(19) United States
(12) Patent Application Publication
(10) Pub. No.: US 2019/0119760 A1
(43) Pub. Date: Apr. 25, 2019

(54) METHODS AND NUCLEIC ACIDS FOR ANALYSES OF CELLULAR PROLIFERATIVE DISORDERS

(71) Applicant: EPIGENOMICS AG, Berlin (DE)

(72) Inventors: Catherine E. Lofton-Day, Seattle, WA (US); Andrew Z. Sledziewski, Shoreline, WA (US); Fabian Model, Berlin (DE); Susan Cottrell, Seattle, WA (US); Juergen Distler, Berlin (DE); Reimo Tetzner, Berlin (DE); Dimo Dietrich, Berlin (DE)

(21) Appl. No.: 16/143,085

(22) Filed: Sep. 26, 2018

Related U.S. Application Data
(63) Continuation of application No. 12/374,654, filed on Feb. 4, 2010, now abandoned.
(60) Provisional application No. 60/832,509, filed on Jul. 21, 2006.
(60) Provisional application No. 60/853,097, filed on Oct. 20, 2006.

(51) Int. Cl. C12Q 1/6886

(52) U.S. Cl. CPC C12Q 1/6886; C12Q 2600/154

(57) ABSTRACT

The invention provides methods, nucleic acids and kits for detecting colorectal cell proliferative disorders based on underexpression or methylation of a least one gene selected from RASSF2, TFAP2E, SNDI, PCDHGC3, EDNRB, STOM, GLI3, RXFP3, LimK1, GPR73L1, PCDH1O, DOCKIO and MRPS21, and optionally Septin-9.

### FIELD OF THE INVENTION

[0001] The present invention relates to genomic DNA sequences that exhibit altered expression patterns in disease states relative to normal. Particular embodiments provide methods, nucleic acids, nucleic acid arrays and kits useful for detecting cell proliferative disorders. The methods and nucleic acids for the detection and diagnosis of cell proliferative disorders as provided in the present invention, are preferably used for the diagnosis of cancer and in particular colorectal cancer.

### CROSS-REFERENCE TO RELATED APPLICATIONS

[0002] This application claims the benefit of priority to United States Provisional Patent Application Nos. 60/832,509, filed 21 Jul. 2006, and 60/853,097, filed 20 Oct. 2006, both entitled “METHODS AND NUCLEIC ACIDS FOR THE ANALYSES OF CELLCULAR PROLIFERATIVE DISORDERS, and both of which are incorporated herein by reference in their entirety.

### SEQUENCE LISTING

[0003] A Sequence Listing in paper form and comprising SEQ ID NOS:1-148 is included with this application and is incorporated by reference herein in its entirety.

### BACKGROUND

[0004] Incidence and Diagnosis of Cancer.

[0005] Cancer is the second leading cause of death of the United States. Mortality rates could be significantly improved if current screening methods would be improved in terms of patient compliance, sensitivity and ease of screening. Current recommended methods for diagnosis of cancer are often expensive and are not suitable for application as population wide screening tests.

[0006] In the United States the annual incidence of colorectal cancer is approximately 150,000, with 56,600 individuals dying from colorectal cancer each year. The lifetime risk of colorectal cancer in the general population is about 5 to 6 percent. Despite intensive efforts in recent years in screening and early detection of colon cancer, until today most cases are diagnosed in an advanced stage with regional or distant metastasis. While the therapeutic options include surgery and adjuvant or palliative chemotherapy, most patients die from progression of their cancer within a few months. Identifying the molecular changes that underlie the development of colon cancer may help to develop new monitoring, screening, diagnostic and therapeutic options that could improve the overall poor prognosis of these patients.

[0007] The current guidelines for colorectal screening according to the American Cancer Society utilizes one of five different options for screening in average risk individuals 50 years of age or older. These options include 1) fecal occult blood test (FOBT) annually, 2) flexible sigmoidoscopy every five years, 3) annual FPBT plus flexible sigmoidoscopy every five years, 4) double contrast barium enema (DCBE) every five years or 5) colonoscopy every ten years. Even though these testing procedures are well accepted by the medical community, the implementation of widespread screening for colorectal cancer has not been realized. Patient compliance is a major factor for limited use due to the discomfort or inconvenience associated with the procedures. FOBT testing, although a non-invasive procedure, requires dietary and other restrictions 3-5 days prior to testing. Sensitivity levels for this test are also very low for colorectal adenocarcinoma with wide variability depending on the trial. Sensitivity measurements for detection of adenomas is even less since most adenomas do not bleed. In contrast, sensitivity for more invasive procedures such as sigmoidoscopy and colonoscopy are quite high because of direct visualization of the lumen of the colon. No randomized trials have evaluated the efficacy of these techniques, however, using data from case-control studies and data from the National Polyp Study (U.S.) it has been shown that removal of adenomatous polyps results in a 76-90% reduction in CRC incidence. Sigmoidoscopy has the limitation of only visualizing the left side of the colon leaving lesions in the right colon undetected. Both scoping procedures are expensive, require cathartic preparation and have increased risk of morbidity and mortality. Improved tests with increased sensitivity, specificity, ease of use and decreased costs are clearly needed before general widespread screening for colorectal cancer becomes routine.

[0008] Early colorectal cancer detection is generally based on the fecal occult blood test (FOBT) performed annually on asymptomatic individuals. Current recommendations adapted by several healthcare organizations, including the American Cancer Society, call for fecal occult blood testing beginning at age 50, repeated annually until such time as the patient would no longer benefit from screening. A positive FOBT leads to colonoscopic examination of the bowel; an expensive and invasive procedure, with a serious complication rate of one per 5,000 examinations. Only 12% of patients with heme positive stool are diagnosed with cancer or large polyps at the time of colonoscopy. A number of studies show that FOBT screening does not improve cancer-related mortality or overall survival. Compliance with occult blood testing has been poor; less than 20 percent of the population is offered or completes FOBT as recommended. If FOBT is properly done, the patient collects a fecal sample from three consecutive bowel movements. Samples are obtained while the patient adheres to dietary guidelines and avoids medications known to induce occult gastrointestinal bleeding. In reality, physicians frequently fail to instruct patients properly, patients frequently fail to adhere to protocol, and some patients find the task of collecting fecal samples difficult or unpleasant, hence compliance with annual occult blood testing is poor. If testing sensitivity and specificity can be improved over current methods, the frequency of testing could be reduced, collection of consecutive samples would be eliminated, dietary and medication schedule modifications would be eliminated, and patient compliance would be enhanced. Compounding the problem of compliance, the sensitivity and specificity of FOBT to detect colon cancer is poor. Poor test specificity leads to unnecessary colonoscopy, adding considerable expense to colon cancer screening.

[0009] Specificity of the FOBT has been calculated at best to be 96%, with a sensitivity of 43% (adenomas) and 50% (colorectal carcinoma). Sensitivity can be improved using an immunoassay FOBT such as that produced under the tradename ‘InSure™’, with an improved sensitivity of 77% (adenomas) and 88.9% (colorectal carcinoma.

[0010] Molecular Disease Markers.

[0011] Molecular disease markers offer several advantages over other types of markers, one advantage being that even samples of very small sizes and/or samples whose tissue architecture has not been maintained can be analyzed quite efficiently. Within the last decade a number of genes have been shown to be differentially expressed between normal and colon carcinomas. However, no single or combination of marker has been shown to be sufficient for the diagnosis of colon carcinomas. High-dimensional mRNA based approaches have recently been shown to be able to provide a better means to distinguish between different tumor types and benign and malignant lesions. However its application as a routine diagnostic tool in a clinical environment is impeded by the extreme instability of mRNA, the rapidly occurring expression changes following certain triggers (e.g., sample collection), and, most importantly, the large amount of mRNA needed for analysis (Lipshutz, R. J. et al., Nature Genetics 21:20-24, 1999; Bowtell, D. D. L. Nature genetics suppl. 21:25-32, 1999), which often cannot be obtained from a routine biopsy.

[0012] The use of biological markers to further improve sensitivity and specificity of FOBT has been suggested, examples of such tests include the PreGen-PIus™ stool analysis assay available from EXACT Sciences which has a sensitivity of 20% (adenoma) and 52% (colorectal carcinoma) and a specificity of 95% in both cases. This test assays for the presence of 23 DNA mutations associated with the development of colon neoplasms. The use of DNA methylation as colon cancer markers is known. For example Sabbioni et al. (Molecular Diagnosis 7:201-207, 2003) detected hypermethylation of a panel of genes consisiting TPEF, HIC1, DAPK and MGMT in peripheral blood in 98% of colon carcinoma patients. However, this does provide a suitable basis for a commercially marketable test, as the specificity of such a test must also be sufficiently high.

[0013] The current model of colorectal pathogenesis favours a stepwise progression of adenomas, which includes the development of dysplasia and finally signs of invasive cancer. The molecular changes underlying this adenoma-carcinoma sequence include genetic and epigenetic alterations of tumor suppressor genes (APC, p53, DCC), the activation of oncogenes (K-ras) and the inactivation of DNA mismatch repair genes. Recently, further molecular changes and genetic defects have been revealed. Thus, activation of the Wnt signalling pathway not only includes mutations of the APC gene, but may also result from β-catenin mutations. Furthermore, alterations in the TGF-β signalling pathway together with its signal transducers SMAD4 and SMAD2 have been linked to the development of colon cancer.

[0014] Despite recent progress in the understanding of the pathogenesis of adenomas and carcinomas of the colon and their genetic and molecular changes, the genetic and epigenetic changes underlying the development of metastasis are less well understood. It is, however, generally well accepted that the process of invasion and proteolysis of the extracellular matrix, as well as infiltration of the vascular basement membrane involve adhesive proteins, such as members of the family of integrin receptors, the cadherins, the immunoglobulin superfamily, the laminin binding protein and the CD44 receptor. Apart from adhesion, the process of metastasis formation also includes the induction and regulation of angiogenesis (VEGF, bFGF), the induction of cell proliferation (EGF, HGF, IGF) and the activation of proteolytic enzymes (MMPs, TIMPs, uPAR), as well as the inhibition of apoptosis (Bcl-2, Bcl-X). More recently other groups have compared the genetic and molecular changes in metastatic lesions to the changes found in primary colorectal cancers. Thus, Kleeff et al. reported the loss of DOC-2, a candidate tumor suppressor gene, both in primary and metastatic colorectal cancer. Furthermore, Zauber et al. reported that in their series of 42 colorectal cancers Ki-ras mutations in the primary cancers were identical in all of the 42 paired primary and synchronous metastatic lesions. Similarly loss of heterozygosity at the APC locus was identical for 39 paired carcinomas and synchronous metastasis. The authors concluded that for Ki-ras and APC genes the genetic changes in metastasis are identical to the primary colorectal cancer. However, other groups have found genetic and molecular changes in metastatic colon cancers, that are not present in the primary cancers. Thus, the development of LOH of chromosome 3p in colorectal metastasis has been reported.

[0015] CpG Island Methylation.

[0016] Apart from mutations aberrant methylation of CpG islands has been shown to lead to the transcriptional silencing of certain genes that have been previously linked to the pathogenesis of various cancers. CpG islands are short sequences which are rich in CpG dinucleotides and can usually be found in the 5′ region of approximately 50% of all human genes. Methylation of the cytosines in these islands leads to the loss of gene expression and has been reported in the inactivation of the X chromosome and genomic imprinting.

[0017] Recently several groups have also analysed the methylation of various genes in colorectal cancer and reported the transcriptional silencing by promoter methylation for p16INK4, p14ARF, p15INK4b, MGMT, hMLH1, GSTP1, DAPK, CDH1, TIMP-3 and APC among others. Thus apart from mutational inactivation of certain genes, the hypermethylation of these genes also contributes significantly to the pathogenesis of this disease.

[0018] In recent years several genes that are methylated in colon cancer have been identified by MS-APPCR. This group of genes, among others, includes TPEF/HPP1 which is frequently methylated in colon cancers and which was independently identified by two different groups using the MS-APPCR method (see, e.g., Young J, Biden K G, Simms L A, Huggard P, Karamatic R, Eyre H J, Sutherland G R, Herath N, Barker M, Anderson G J, Fitzpatrick D R, Ramm G A, Jass J R, Leggett B A. HPP1: a transmembrane protein-encoding gene commonly methylated in colorectal polyps and cancers. Proc Natl Acad Sci USA 98:265-270, 2001).

[0019] Multifactorial Approach.

[0020] Cancer diagnostics has traditionally relied upon the detection of single molecular markers (e.g., gene mutations, elevated PSA levels). Unfortunately, cancer is a disease state in which single markers have typically failed to detect or differentiate many forms of the disease. Thus, assays that recognize only a single marker have been shown to be of limited predictive value. A fundamental aspect of this invention is that methylation-based cancer diagnostics and the screening, diagnosis, and therapeutic monitoring of such diseases will provide significant improvements over the state-of-the-art that uses single marker analyses by the use of a selection of multiple markers. The multiplexed analytical approach is particularly well suited for cancer diagnostics since cancer is not a simple disease, this multi-factorial “panel” approach is consistent with the heterogeneous nature of cancer, both cytologically and clinically.

Key to the successful implementation of a panel approach to methylation based diagnostic tests is the design and development of optimized panels of markers that can characterize and distinguish disease states. The present invention describes a plurality of particularly efficient and unique panels of genes, the methylation analysis of one or a combination of the members of the panel enabling the detection of colon cell proliferative disorders with a particularly high sensitivity, specificity and/or predictive value.

[0021] Development of Medical Tests.

[0022] Two key evaluative measures of any medical screening or diagnostic test are its sensitivity and specificity, which measure how well the test performs to accurately detect all affected individuals without exception, and without falsely including individuals who do not have the target disease (predicitive value). Historically, many diagnostic tests have been criticized due to poor sensitivity and specificity.

[0023] A true positive (TP) result is where the test is positive and the condition is present. A false positive (FP) result is where the test is positive but the condition is not present. A true negative (TN) result is where the test is negative and the condition is not present. A false negative (FN) result is where the test is negative but the condition is not present. In this context: Sensitivity=TP/(TP+FN); Specificity=TN/(FP+TN); and Predictive value=TP/(TP+FP).

[0024] Sensitivity is a measure of a test's ability to correctly detect the target disease in an individual being tested. A test having poor sensitivity produces a high rate of false negatives, i.e., individuals who have the disease but are falsely identified as being free of that particular disease. The potential danger of a false negative is that the diseased individual will remain undiagnosed and untreated for some period of time, during which the disease may progress to a later stage wherein treatments, if any, may be less effective. An example of a test that has low sensitivity is a protein-based blood test for HIV. This type of test exhibits poor sensitivity because it fails to detect the presence of the virus until the disease is well established and the virus has invaded the bloodstream in substantial numbers. In contrast, an example of a test that has high sensitivity is viral-load detection using the polymerase chain reaction (PCR). High sensitivity is achieved because this type of test can detect very small quantities of the virus. High sensitivity is particularly important when the consequences of missing a diagnosis are high.

[0025] Specificity, on the other hand, is a measure of a test's ability to identify accurately patients who are free of the disease state. A test having poor specificity produces a high rate of false positives, i.e., individuals who are falsely identified as having the disease. A drawback of false positives is that they force patients to undergo unnecessary medical procedures treatments with their attendant risks, emotional and financial stresses, and which could have adverse effects on the patient's health. A feature of diseases which makes it difficult to develop diagnostic tests with high specificity is that disease mechanisms, particularly in cancer, often involve a plurality of genes and proteins. Additionally, certain proteins may be elevated for reasons unrelated to a disease state. n example of a test that has high specificity is a gene-based test that can detect a p53 mutation. Specificity is important when the cost or risk associated with further diagnostic procedures or further medical intervention are very high.

[0026] Pronounced Need in the Art.

[0027] It is generally accepted that there is a pronounced need in the art for improved screening and early detection of cancers. As an example, if colon cancer screening specificity can be increased, the problem of false positive test results leading to unnecessary colonoscopic examination would be reduced leading to cost savings and improved safety.

[0028] In view of the incidence of cancers in general and more particularly the disadvantages associated with current colorectal cell proliferative disorder screening methods there is a substantial need in the art for improved methods for the early detection of cancer, in particular colon cancer, to be used in addition to or as a substitute for currently available tests.

[0029] Background of the Genes of the Present Invention.

[0030] The human Septin 9 gene (also known as MLL septin-like fusion protein, MLL septin-like fusion protein MSF-A, Slpa, Eseptin, Msf, septin-like protein Ovarian/Breast septin (Ov/Br septin) and Septin D1) is located on chromosome 17q25 within contig AC068594.15.1.168501 and is a member of the Septin gene family. SEQ ID NO: 12 provides the sequence of said gene, comprising regions of both the Septin 9 and Q9HC74 transcripts and promoter regions. SEQ ID NO: 13 and SEQ ID NO: 14 provide particularly preferred CpG rich regions of said gene according to the present invention.

[0031] It has been postulated that members of the Septin gene family are associated with multiple cellular functions ranging from vesicle transport to cytokinesis. Disruption of the action of Septin 9 results in incomplete cell division, see Surka, M. C., Tsang, C. W., and Trimble, W. S. Mol Biol Cell, 13: 3532-45 (2002). Septin 9 and other proteins have been shown to be fusion partners of the proto-oncogene MLL suggesting a role in tumorogenesis, see Osaka, M, Rowley, J. D. and Zeleznik-Le, N. J. PNAS, 96:6428-6433 (1999). Burrows et al. reported an in depth study of expression of the multiple isoforms of the Septin 9 gene in ovarian cancer and showed tissue specific expression of various transcripts, see Burrows, J. F., Chanduloy, et al. S.E.H. Journal of Pathology, 201:581-588 (2003).

[0032] A recent study (post-priority date published prior art) of over 7000 normal and tumor tissues indicates that there is consistent over-expression of Septin 9 isoforms in a number of tumor tissues, see Scott, M., Hyland, P. L., et al. Oncogene, 24: 4688-4700 (2005). The authors speculate that the gene is likely a type II cancer gene where changes in RNA transcript processing control regulation of different protein products, and the levels of these altered protein isoforms may provide answers to the gene's role in malignancy.

### BRIEF DESCRIPTION OF THE DRAWINGS

[0033] FIGS. 1 to 10 provide an overview of the log mean methylation measured by means of the HM assay according to Example 2. Each figures consists of three plots, the upper and lower left hand side plots provide the binary and multiclass analysis respectively, sensitivity is shown on the Y-axis, DNA methylation measured in (log 10 ng/mL) is shown on the X-axis.

[0034] In each figure the right hand plot provides an ROC wherein sensitivity is shown on the Y-axis and 1-specificity is shown on the X-axis.

[0035] FIG. 1 provides an overview of the performance of the RASSF2 HM assay according to Example 2, in all samples.

[0036] FIG. 2 provides an overview of the performance of the Septin 9 HM assay according to Example 2, in all samples.

[0037] FIG. 3 provides an overview of the performance of the SND1 HM assay according to Example 2, in all samples.

[0038] FIG. 4 provides an overview of the performance of the PCDHGC3 HM assay according to Example 2, in all samples.

[0039] FIG. 5 provides an overview of the performance of the TFAP2E HM assay according to Example 2, in all samples.

[0040] FIG. 6 provides an overview of the performance of the RASSF2 HM assay according to Example 2, in all colorectal carcinoma and normal colorectal tissue samples.

[0041] FIG. 7 provides an overview of the performance of the Septin 9 HM assay according to Example 2, in all colorectal carcinoma and normal colorectal tissue samples.

[0042] FIG. 8 provides an overview of the performance of the SND1 HM assay according to Example 2, in all colorectal carcinoma and normal colorectal tissue samples.

[0043] FIG. 9 provides an overview of the performance of the PCDHGC3 HM assay according to Example 2, in all colorectal carcinoma and normal colorectal tissue samples.

[0044] FIG. 10 provides an overview of the performance of the TFAP2E HM assay according to Example 2, in all colorectal carcinoma and normal colorectal tissue samples.

[0045] FIG. 11 provides an overview of the predictive power of the logistic regression model of combinations of markers. Se is sensitivitiy, sp is specificity, AUC is area under the curve.

[0046] FIGS. 12 to 21 provide an overview of the log majority mean methylation measured by means of the HM assay according to Example 2. Each figures consists of three plots, the upper and lower left hand side plots provide the binary and multiclass analysis respectively, sensitivity is shown on the Y-axis, DNA methylation measured in (log 10 ng/mL) is shown on the X-axis.

[0047] In each figure the right hand plot provides an ROC wherein sensitivity is shown on the Y-axis and 1-specificity is shown on the X-axis.

[0048] FIG. 12 provides an overview of the performance of the RASSF2 HM assay according to Example 2, in all samples.

[0049] FIG. 13 provides an overview of the performance of the Septin 9 HM assay according to Example 2, in all samples.

[0050] FIG. 14 provides an overview of the performance of the SND1 HM assay according to Example 2, in all samples.

[0051] FIG. 15 provides an overview of the performance of the PCDHGC3 HM assay according to Example 2, in all samples.

[0052] FIG. 16 provides an overview of the performance of the TFAP2E HM assay according to Example 2, in all samples.

[0053] FIG. 17 provides an overview of the performance of the RASSF2 HM assay according to Example 2, in all colorectal carcinoma and normal colorectal tissue samples.

[0054] FIG. 18 provides an overview of the performance of the Septin 9 HM assay according to Example 2, in all colorectal carcinoma and normal colorectal tissue samples.

[0055] FIG. 19 provides an overview of the performance of the SND1 HM assay according to Example 2, in all colorectal carcinoma and normal colorectal tissue samples.

[0056] FIG. 20 provides an overview of the performance of the PCDHGC3 HM assay according to Example 2, in all colorectal carcinoma and normal colorectal tissue samples.

[0057] FIG. 21 provides an overview of the performance of the TFAP2E HM assay according to Example 2, in all colorectal carcinoma and normal colorectal tissue samples.

[0058] FIGS. 22 to 26 provide an overview of the log mean methylation measured by means of combinations HM assays (gene panels) according to Example 2. Each figures consists of two plots, The upper plot shows all samples (Normals, Non Colorectal Disease, Non-Coloretal Cancers and all CRC stages), the lower plot shows only Normaland CRC samples.

sensitivity is shown on the Y-axis, DNA methylation measured in (log 10 ng/mL) is shown on the X-axis.

[0059] FIG. 22 provides an overview of the performance of the Septin 9+TFAP2E+RASSF2+PCDHGC3+SN D1 assays.

[0060] FIG. 23 provides an overview of the performance of the Septin 9+TFAP2E+RASSF2+PCDHGC3 assays.

[0061] FIG. 24 provides an overview of the performance of the Septin 9+TFAP2E+RASSF2 assays.

[0062] FIG. 25 provides an overview of the performance of the Septin 9+TFAP2E assays.

[0063] FIG. 26 provides an overview of the performance of the Septin 9+RASSF2 assays.

[0064] FIGS. 27 and 28 provide an overview of the methylation measured by means of the MSP assay according to Example 1. Each figure consists of three plots, the upper and lower left hand side plots provide the binary and multiclass analysis respectively, sensitivity is shown on the Y-axis, DNA methylation is shown on the X-axis. In each figure the right hand plot provides an ROC wherein sensitivity is shown on the Y-axis and 1-specificity is shown on the X-axis. FIG. 27 provides an overview of the MRPS21 assay according to Example 1. FIG. 28 provides an overview of the DOCK10 assay according to Example 1.

### SUMMARY OF THE INVENTION

[0065] The present invention provides a method for detecting cell proliferative disorders in a subject comprising determining the expression levels of at least one gene selected from the group consisting of RASSF2, TFAP2E, SND1, PCDHGC3, EDNRB, STOM, GLI3, RXFP3, LimK1, GPR73L1, PCDH10, DOCK10 and MRPS21 in a biological sample isolated from said subject wherein underexpression and/or CpG methylation is indicative of the presence or class of said disorder. Preferably said group consists of the genes RASSF2, TFAP2E, SND1 & PCDHGC3.

[0066] Aspects of the invention provide a method for detecting cell proliferative disorders in a subject comprising determining the expression levels of the gene Septin 9 and at least one gene selected from the group consisting of RASSF2, TFAP2E, SND1, PCDHGC3, EDNRB, STOM, GLI3, RXFP3, LimK1, GPR73L1, PCDH10, DOCK10 and MRPS21. Preferably said group consists of the genes RASSF2, TFAP2E, SND1 & PCDHGC3.

[0067] Preferably the expression of a plurality of said genes is determined. Preferably the expression of 2, 3 or 4 of said genes is determined. Preferably the expression levels of one the following combinations of genes is determined:
[0068] Septin 9+RASSF2+TFAP2E+PCDHGC3+SND1
[0069] Septin 9+RASSF2+TFAP2E+PCDHGC3
[0070] Septin 9+RASSF2+TFAP2E
[0071] Septin 9+TFAP2E+PCDHGC3
[0072] Septin 9+RASSF2
[0073] Septin 9+TFAP2E
[0074] Septin 9+PCDHGC3

[0075] Various aspects of the present invention provide an efficient and unique genetic marker, whereby expression analysis of said marker enables the detection of cellular proliferative disorders with a particularly high sensitivity, specificity and/or predictive value. In the context of colorectal carcinoma the inventive testing methods have particular utility for the screening of at-risk populations. The inventive methods have advantages over prior art methods (including the industry standard FOBT), because of improved sensitivity, specificity and likely patient compliance.

[0076] The methods and nucleic acids of the present invention are most preferably utilised for detecting colorectal carcinoma.

[0077] In one embodiment the invention provides a method for detecting cell proliferative disorders, most preferably colorectal carcinomas in a subject comprising determining the expression levels of at least one gene selected from the group consisting of RASSF2, TFAP2E, SND1, PCDHGC3, EDNRB, STOM, GLI3, RXFP3, LimK1, GPR73L1, PCDH10, DOCK10 and MRPS21 in a biological sample isolated from said subject wherein underexpression and/or CpG methylation is indicative of the presence or class of said disorder. Preferably said group consists of the genes RASSF2, TFAP2E, SND1 & PCDHGC3.

[0078] Preferably the presence, absence or level of mRNA expression of a plurality of said genes is determined. Preferably the expression of 2, 3 or 4 of said genes is determined.

[0079] In one embodiment said expression level is determined by detecting the presence, absence or level of mRNA transcribed from said gene. It is particularly preferred that said method comprises determining the expression levels of the gene Septin 9 and of at least one gene selected from the group consisting of RASSF2, TFAP2E, SND1, PCDHGC3, EDNRB, STOM, GLI3, RXFP3, LimK1, GPR73L1, PCDH10, DOCK10 and MRPS21. Preferably said group consists of the genes RASSF2, TFAP2E, SND1 & PCDHGC3. Preferably the expression of 2, 3 or 4 of said genes is determined. Preferably the expression levels of one the following combinations of genes is determined:
[0080] Septin 9+RASSF2+TFAP2E+PCDHGC3+SND1
[0081] Septin 9+RASSF2+TFAP2E+PCDHGC3
[0082] Septin 9+RASSF2+TFAP2E
[0083] Septin 9+TFAP2E+PCDHGC3
[0084] Septin 9+RASSF2
[0085] Septin 9+TFAP2E
[0086] Septin 9+PCDHGC3

[0087] In a further embodiment said expression level is determined by detecting the presence, absence or level of a polypeptide encoded by said gene or sequence thereof

[0088] In a further preferred embodiment said expression is determined by detecting the presence or absence of CpG methylation within said gene, wherein the presence of methylation indicates the presence of a cell proliferative disorder. Said method comprises the following steps: i) contacting genomic DNA isolated from a biological sample (preferably selected from the group consisting of blood plasma, blood serum, whole blood, isolated blood cells, cells isolated from the blood) obtained from the subject with at least one reagent, or series of reagents that distinguishes between methylated and non-methylated CpG dinucleotides within at least one target region of the genomic DNA, wherein the nucleotide sequence of said target region comprises at least one CpG dinucleotide sequence of at least one gene selected from the group consisting of RASSF2, TFAP2E, SND1, PCDHGC3, EDNRB, STOM, GLI3, RXFP3, LimK1, GPR73L1, PCDH10, DOCK10 and MRPS21; and ii) detecting cell proliferative disorders (preferably colorectal carcinoma), at least in part.

[0089] Preferably said group consists of the genes RASSF2, TFAP2E, SND1 & PCDHGC3 and/or their promotor or regulatory regions. Preferably a plurality of target regions are analysed. Preferably 2, 3 or 4 of target regions are analysed.

[0090] Preferably the target region comprises, or hybridizes under stringent conditions to a sequence of at least 16 contiguous nucleotides of at least one sequence selected from the group consisting of SEQ ID NO: 1 TO SEQ ID NO: 11 AND SEQ ID NO: 132 TO SEQ ID NO: 133. Preferably said group consists of SEQ ID NO: 1; SEQ ID NO: 2; SEQ ID NO: 7 & SEQ ID NO: 11.

[0091] In i) it is particularly preferred that the nucleotide sequence of said target region comprises at least one CpG dinucleotide sequence of the gene Septin 9 and at least one gene selected from the group consisting of RASSF2, TFAP2E, SND1, PCDHGC3, EDNRB, STOM, GLI3, RXFP3, LimK1, GPR73L1, PCDH10, DOCK10 and MRPS21. Preferably said group consists of the genes RASSF2, TFAP2E, SND1 & PCDHGC3 and/or their promotor or regulatory regions.

[0092] Preferably the target regions consist of one the following combinations of genes:
[0093] Septin 9+RASSF2+TFAP2E+PCDHGC3+SND1
[0094] Septin 9+RASSF2+TFAP2E+PCDHGC3
[0095] Septin 9+RASSF2+TFAP2E
[0096] Septin 9+TFAP2E+PCDHGC3
[0097] Septin 9+RASSF2
[0098] Septin 9+TFAP2E
[0099] Septin 9+PCDHGC3

[0100] Preferably, the sensitivity of said detection is from about 75% to about 96%, or from about 80% to about 90%, or from about 80% to about 85%. Preferably, the specificity is from about 75% to about 96%, or from about 80% to about 90%, or from about 80% to about 85%.

[0101] The method is novel as no methods currently exist that enable the detection of cancer by analysis of body fluids, with a sensitivity and specificity high enough for use in a commercially available and regulatory body approved assay. For example, current methods used to detect and diagnose colorectal carcinoma include colonoscopy, sigmoidoscopy, and fecal occult blood colon cancer. In comparison to these methods, the disclosed invention is much less invasive than colonoscopy, and as, if not more sensitive than sigmoidoscopy and FOBT. The development of a body fluid assay represents a clear technical advantage over current methods known in the art in that it is anticipated that at least for colorectal carcinoma screening patient compliance for a single body fluid based test will be higher than the triplicate analysis of stool currently recommended for FOBT.

[0102] A particular embodiment the method comprises the use of at least one gene selected from the group consisting of RASSF2, TFAP2E, SND1, PCDHGC3, EDNRB, STOM, GLI3, RXFP3, LimK1, GPR73L1, PCDH10, DOCK10 and MRPS21 as a marker for the detection and distinguishing of cellular proliferative disorders. Preferably said group consists of the genes RASSF2, TFAP2E, SND1 & PCDHGC3 and/or their promotor or regulatory regions.

[0103] A preferred embodiment the method comprises the use of at least one gene selected from the group consisting of RASSF2, TFAP2E, SND1, PCDHGC3, EDNRB, STOM, GLI3, RXFP3, LimK1, GPR73L1, PCDH10, DOCK10 and MRPS21 in combination with the gene Septin 9 as a marker for the detection and distinguishing of cellular proliferative disorders. Preferably said group consists of the genes RASSF2, TFAP2E, SND1 & PCDHGC3 and/or their promotor or regulatory regions.

[0104] Preferably a plurality of genes are analysed. Preferably 2, 3 or 4 genes are analysed. Particularly preferred are the following combinations of genes:
[0105] Septin 9+RASSF2+TFAP2E+PCDHGC3+SND1
[0106] Septin 9+RASSF2+TFAP2E+PCDHGC3
[0107] Septin 9+RASSF2+TFAP2E
[0108] Septin 9+TFAP2E+PCDHGC3
[0109] Septin 9+RASSF2
[0110] Septin 9+TFAP2E
[0111] Septin 9+PCDHGC3

[0112] The present invention is particularly suited for the detection of cancerous cellular proliferative disorders. The methods and nucleic acids of the present invention are particularly effective in the detection of colorectal cancers. Said use of the gene may be enabled by means of any analysis of the expression of the gene, by means of mRNA expression analysis or protein expression analysis. However, in the most preferred embodiment of the invention, the detection of colorectal cell proliferative disorders is enabled by means of analysis of the methylation status of at least one gene selected from the group consisting of RASSF2, TFAP2E, SND1, PCDHGC3, EDNRB, STOM, GLI3, RXFP3, LimK1, GPR73L1, PCDH10, DOCK10 and MRPS21, and their promoter or regulatory elements. Preferably said group consists of the genes RASSF2, TFAP2E, SND1 & PCDHGC3 and/or their promotor or regulatory regions. Preferably a plurality of genes are analysed. Preferably 2, 3 or 4 genes are analysed.

[0113] It is further preferred that the detection of colorectal cell proliferative disorders is enabled by means of analysis of the methylation status of the gene Septin 9 in combination with at least one gene selected from the group consisting of RASSF2, TFAP2E, SND1, PCDHGC3, EDNRB, STOM, GLI3, RXFP3, LimK1, GPR73L1, PCDH10, DOCK10 and MRPS21, and its promoter or regulatory elements. Preferably said group consists of the genes RASSF2, TFAP2E, SND1 & PCDHGC3 and/or their promotor or regulatory regions. Preferably a plurality of genes are analysed. Preferably 2, 3 or 4 genes are analysed. Particularly preferred are the following combinations of genes:
[0114] Septin 9+RASSF2+TFAP2E+PCDHGC3+SND1
[0115] Septin 9+RASSF2+TFAP2E+PCDHGC3
[0116] Septin 9+RASSF2+TFAP2E
[0117] Septin 9+TFAP2E+PCDHGC3
[0118] Septin 9+RASSF2
[0119] Septin 9+TFAP2E
[0120] Septin 9+PCDHGC3

[0121] The invention provides a method for the analysis of biological samples for features associated with the development of cellular proliferative disorders, the method characterised in that at least one nucleic acid, or a fragment thereof, from the group consisting of SEQ ID NO: 1 TO SEQ ID NO: 11 AND SEQ ID NO: 132 TO SEQ ID NO: 133 is contacted with a reagent or series of reagents capable of distinguishing between methylated and non methylated CpG dinucleotides within the genomic sequence, or sequences of interest. In a preferred embodiment said group consists of SEQ ID NO: 1; SEQ ID NO: 2; SEQ ID NO: 7 & SEQ ID NO: 11.

[0122] It is further preferred that at least one nucleic acid, or a fragment thereof, of SEQ ID NO: 12 TO SEQ ID NO: 14 and at least one nucleic acid, or a fragment thereof, from the group consisting of SEQ ID NO: 1 TO SEQ ID NO: 11 AND SEQ ID NO: 132 TO SEQ ID NO: 133 (or more preferably SEQ ID NO: 1; SEQ ID NO: 2; SEQ ID NO: 7 & SEQ ID NO: 11) is contacted with a reagent or series of reagents capable of distinguishing between methylated and non methylated CpG dinucleotides.

[0123] The present invention provides a method for ascertaining epigenetic parameters of genomic DNA associated with the development of neoplastic cellular proliferative disorders (e.g. cancers). The method has utility for the improved diagnosis, treatment and monitoring of said diseases.

[0124] Preferably, the source of the test sample is selected from the group consisting of cells or cell lines, histological slides, biopsies, paraffin-embedded tissue, body fluids, ejaculate, stool, urine, blood, and combinations thereof. More preferably, the source is selected from the group consisting of stool, blood plasma, blood serum, whole blood, isolated blood cells, cells isolated from the blood obtained from the subject.

[0125] Specifically, the present invention provides a method for detecting neoplastic cellular proliferative disorders (preferably colorectal carcinoma) including at early stages, comprising: obtaining a biological sample comprising genomic nucleic acid(s); contacting the nucleic acid(s), or a fragment thereof, with one reagent or a plurality of reagents sufficient for distinguishing between methylated and non methylated CpG dinucleotide sequences within at least one target sequence of the subject nucleic acid, wherein the target sequence comprises, or hybridises under stringent conditions to, a sequence comprising at least 16 contiguous nucleotides of a sequence selected from the group consisting SEQ ID NO: 1 TO SEQ ID NO: 11 AND SEQ ID NO: 132 TO SEQ ID NO: 133 (more preferably SEQ ID NO: 1; SEQ ID NO: 2; SEQ ID NO: 7 & SEQ ID NO: 11), said contiguous nucleotides comprising at least one CpG dinucleotide sequence; and determining, based at least in part on said distinguishing, the methylation state of at least one target CpG dinucleotide sequence, or an average, or a value reflecting an average methylation state of a plurality of target CpG dinucleotide sequences. It is further preferred that at least two target sequence s are analysed wherein a first target sequence comprises, or hybridises under stringent conditions to, a sequence comprising at least 16 contiguous nucleotides of a sequence selected from the group consisting SEQ ID NO: 12 TO SEQ ID NO: 14 and a second target region comprises, or hybridises under stringent conditions to, a sequence comprising at least 16 contiguous nucleotides of a sequence selected from the group consisting SEQ ID NO: 1 TO SEQ ID NO: 11 AND SEQ ID NO: 132 TO SEQ ID NO: 133 (more preferably SEQ ID NO: 1; SEQ ID NO: 2; SEQ ID NO: 7 & SEQ ID NO: 11).

[0126] Preferably, distinguishing between methylated and non methylated CpG dinucleotide sequences within the target sequence comprises methylation state-dependent conversion or non-conversion of at least one such CpG dinucleotide sequence to the corresponding converted or non-converted dinucleotide sequence within a sequence selected from the group consisting of SEQ ID NO: 15 TO SEQ ID NO: 36 AND SEQ ID NO: 43 TO SEQ ID NO: 64 AND SEQ ID NO: 134 TO SEQ ID NO: 141, and contiguous regions thereof corresponding to the target sequence. It is further preferred that said consists of SEQ ID NOS: 15, 16, 43, 44, 17, 18, 45, 46, 27, 28, 55, 56, 35 36 63 & 64.

[0127] It is further preferred that distinguishing between methylated and non methylated CpG dinucleotide sequences within the target sequence comprises methylation state-dependent conversion or non-conversion of at least one such CpG dinucleotide sequence to the corresponding converted or non-converted dinucleotide sequence within SEQ ID NO: 37 TO SEQ ID NO: 42 AND SEQ ID NO: 65 TO SEQ ID NO: 70 and at least one such CpG dinucleotide sequence to the corresponding converted or non-converted dinucleotide sequence selected from the group consisting of SEQ ID NO: 15 TO SEQ ID NO: 36 AND SEQ ID NO: 43 TO SEQ ID NO: 64 AND SEQ ID NO: 134 TO SEQ ID NO: 141 (and more preferably the group consisting of SEQ ID NOS: 15, 16, 43, 44, 17, 18, 45, 46, 27, 28, 55, 56, 35 36 63 & 64), and contiguous regions thereof corresponding to the target sequence.

[0128] Additional embodiments provide a method for the detection of neoplastic cellular proliferative disorders, most preferably colorectal carcinoma, comprising: obtaining a biological sample having subject genomic DNA; extracting the genomic DNA; treating the genomic DNA, or a fragment thereof, with one or more reagents to convert 5-position unmethylated cytosine bases to uracil or to another base that is detectably dissimilar to cytosine in terms of hybridization properties; contacting the treated genomic DNA, or the treated fragment thereof, with an amplification enzyme and at least two primers comprising, in each case a contiguous sequence at least 9 nucleotides in length that is complementary to, or hybridizes under moderately stringent or stringent conditions to a sequence selected from the group consisting SEQ ID NO: 15 TO SEQ ID NO: 36 AND SEQ ID NO: 43 TO SEQ ID NO: 64 AND SEQ ID NO: 134 TO SEQ ID NO: 141 (and more preferably the group consisting of SEQ ID NOS: 15, 16, 43, 44, 17, 18, 45, 46, 27, 28, 55, 56, 35 36 63 & 64), and complements thereof, wherein the treated DNA or the fragment thereof is either amplified to produce an amplificate, or is not amplified; and determining, based on a presence or absence of, or on a property of said amplificate, the methylation state or an average, or a value reflecting an average of the methylation level of at least one, but more preferably a plurality of CpG dinucleotides of a sequence selected from the group consisting of SEQ ID NO: 1 TO SEQ ID NO: 11 AND SEQ ID NO: 132 TO SEQ ID NO: 133 (and more preferably the group consisting of SEQ ID NO: 1; SEQ ID NO: 2; SEQ ID NO: 7 & SEQ ID NO: 11). It is further preferred that said method additionally comprises contacting the treated genomic DNA, or the treated fragment thereof, with an amplification enzyme and at least two primers comprising, in each case a contiguous sequence at least 9 nucleotides in length that is complementary to, or hybridizes under moderately stringent or stringent conditions to a sequence selected from the group consisting SEQ ID NO: 37 TO SEQ ID NO: 42 AND SEQ ID NO: 65 TO SEQ ID NO: 70, and complements thereof, wherein the treated DNA or the fragment thereof is either amplified to produce an amplificate, or is not amplified; and determining, based on a presence or absence of, or on a property of said amplificate, the methylation state or an average, or a value reflecting an average of the methylation level of at least one, but more preferably a plurality of CpG dinucleotides of a sequence selected from the group consisting of SEQ ID NO: 12 TO SEQ ID NO: 14.

[0129] Preferably, determining comprises use of at least one method selected from the group consisting of: I) hybridizing at least one nucleic acid molecule comprising a contiguous sequence at least 9 nucleotides in length that is complementary to, or hybridizes under moderately stringent or stringent conditions to a sequence selected from the group consisting of SEQ ID NO: 15 TO SEQ ID NO: 36 AND SEQ ID NO: 43 TO SEQ ID NO: 64 AND SEQ ID NO: 134 TO SEQ ID NO: 141 (and more preferably the group consisting of SEQ ID NOS: 15, 16, 43, 44, 17, 18, 45, 46, 27, 28, 55, 56, 35 36 63 & 64), and complements thereof; ii) hybridizing at least one nucleic acid molecule, bound to a solid phase, comprising a contiguous sequence at least 9 nucleotides in length that is complementary to, or hybridizes under moderately stringent or stringent conditions to a sequence selected from the group consisting of SEQ ID NO: 15 TO SEQ ID NO: 36 AND SEQ ID NO: 43 TO SEQ ID NO: 64 AND SEQ ID NO: 134 TO SEQ ID NO: 141 (and more preferably the group consisting of SEQ ID NOS: 15, 16, 43, 44, 17, 18, 45, 46, 27, 28, 55, 56, 35 36 63 & 64), and complements thereof; iii) hybridizing at least one nucleic acid molecule comprising a contiguous sequence at least 9 nucleotides in length that is complementary to, or hybridizes under moderately stringent or stringent conditions to a sequence selected from the group consisting of SEQ ID NO: 15 TO SEQ ID NO: 36 AND SEQ ID NO: 43 TO SEQ ID NO: 64 AND SEQ ID NO: 134 TO SEQ ID NO: 141 (and more preferably the group consisting of SEQ ID NOS: 15, 16, 43, 44, 17, 18, 45, 46, 27, 28, 55, 56, 35 36 63 & 64), and complements thereof, and extending at least one such hybridized nucleic acid molecule by at least one nucleotide base; and iv) sequencing of the amplificate.

[0130] Further embodiments provide a method for the analysis (i.e. detection) of cell proliferative disorders, comprising: obtaining a biological sample having subject genomic DNA; extracting the genomic DNA; contacting the genomic DNA, or a fragment thereof, comprising one or more sequences selected from the group consisting of SEQ ID NO: 1 TO SEQ ID NO: 11 AND SEQ ID NO: 132 TO SEQ ID NO: 133 (and more preferably the sub-group thereof consisting of SEQ ID NO: 1; SEQ ID NO: 2; SEQ ID NO: 7 & SEQ ID NO: 11) ora sequence that hybridizes under stringent conditions thereto, with one or more methylation-sensitive restriction enzymes, wherein the genomic DNA is either digested thereby to produce digestion fragments, or is not digested thereby; and determining, based on a presence or absence of, or on property of at least one such fragment, the methylation state of at least one CpG dinucleotide sequence of at least one genomic sequence selected from the group consisting of SEQ ID NO: 1 TO SEQ ID NO: 11 AND SEQ ID NO: 132 TO SEQ ID NO: 133 (and more preferably the sub-group thereof consisting of SEQ ID NO: 1; SEQ ID NO: 2; SEQ ID NO: 7 & SEQ ID NO: 11), or an average, or a value reflecting an average methylation state of a plurality of CpG dinucleotide sequences thereof. Preferably, the digested or undigested genomic DNA is amplified prior to said determining.

[0131] It is further preferred that said method additionally comprises determining, based on a presence or absence of, or on property of at least one such fragment, the methylation state of at least one CpG dinucleotide sequence of at least one genomic sequence selected from the group consisting of SEQ ID NO: 12 TO SEQ ID NO: 14, or an average, or a value reflecting an average methylation state of a plurality of CpG dinucleotide sequences thereof.

[0132] Additional embodiments provide novel genomic and chemically modified nucleic acid sequences, as well as oligonucleotides and/or PNA-oligomers for analysis of cytosine methylation patterns within sequences from the group consisting of SEQ ID NO: 1 TO SEQ ID NO: 11 AND SEQ ID NO: 132 TO SEQ ID NO: 133 (and more preferably the sub-group thereof consisting of SEQ ID NO: 1; SEQ ID NO: 2; SEQ ID NO: 7 & SEQ ID NO: 11).

### BRIEF DESCRIPTION OF THE DRAWINGS

### Detailed Description of the Invention

### Definitions

[0133] The term “Observed/Expected Ratio” (“O/E Ratio”) refers to the frequency of CpG dinucleotides within a particular DNA sequence, and corresponds to the [number of CpG sites/(number of C bases×number of G bases)]/band length for each fragment.

[0134] The term “CpG island” refers to a contiguous region of genomic DNA that satisfies the criteria of (1) having a frequency of CpG dinucleotides corresponding to an “Observed/Expected Ratio” >0.6, and (2) having a “GC Content” >0.5. CpG islands are typically, but not always, between about 0.2 to about 1 KB, or to about 2 kb in length.

[0135] The term “methylation state” or “methylation status” refers to the presence or absence of 5-methylcytosine (“5-mCyt”) at one or a plurality of CpG dinucleotides within a DNA sequence. Methylation states at one or more particular CpG methylation sites (each having two CpG dinucleotide sequences) within a DNA sequence include “unmethylated,” “fully-methylated” and “hemi-methylated.”

[0136] The term “hemi-methylation” or “hemimethylation” refers to the methylation state of a double stranded DNA wherein only one strand thereof is methylated.

[0137] The term ‘AUC’ as used herein is an abbreviation for the area under a curve. In particular it refers to the area under a Receiver Operating Characteristic (ROC) curve. The ROC curve is a plot of the true positive rate against the false positive rate for the different possible cut points of a diagnostic test. It shows the trade-off between sensitivity and specificity depending on the selected cut point (any increase in sensitivity will be accompanied by a decrease in specificity). The area under an ROC curve (AUC) is a measure for the accuracy of a diagnostic test (the larger the area the better, optimum is 1, a random test would have a ROC curve lying on the diagonal with an area of 0.5; for reference: J. P. Egan. Signal Detection Theory and ROC Analysis, Academic Press, New York, 1975).

[0138] The term “hypermethylation” refers to the average methylation state corresponding to an increased presence of 5-mCyt at one or a plurality of CpG dinucleotides within a DNA sequence of a test DNA sample, relative to the amount of 5-mCyt found at corresponding CpG dinucleotides within a normal control DNA sample.

[0139] The term “hypomethylation” refers to the average methylation state corresponding to a decreased presence of 5-mCyt at one or a plurality of CpG dinucleotides within a DNA sequence of a test DNA sample, relative to the amount of 5-mCyt found at corresponding CpG dinucleotides within a normal control DNA sample.

[0140] The term “microarray” refers broadly to both “DNA microarrays,” and ‘DNA chip(s),’ as recognized in the art, encompasses all art-recognized solid supports, and encompasses all methods for affixing nucleic acid molecules thereto or synthesis of nucleic acids thereon.

[0141] “Genetic parameters” are mutations and polymorphisms of genes and sequences further required for their regulation. To be designated as mutations are, in particular, insertions, deletions, point mutations, inversions and polymorphisms and, particularly preferred, SNPs (single nucleotide polymorphisms).

[0142] “Epigenetic parameters” are, in particular, cytosine methylation. Further epigenetic parameters include, for example, the acetylation of histones which, however, cannot be directly analysed using the described method but which, in turn, correlate with the DNA methylation.

[0143] The term “bisulfite reagent” refers to a reagent comprising bisulfite, disulfite, hydrogen sulfite or combinations thereof, useful as disclosed herein to distinguish between methylated and unmethylated CpG dinucleotide sequences.

[0144] The term “Methylation assay” refers to any assay for determining the methylation state of one or more CpG dinucleotide sequences within a sequence of DNA.

[0145] The term “MS.AP-PCR” (Methylation-Sensitive Arbitrarily-Primed Polymerase Chain Reaction) refers to the art-recognized technology that allows for a global scan of the genome using CG-rich primers to focus on the regions most likely to contain CpG dinucleotides, and described by Gonzalgo et al., Cancer Research 57:594-599, 1997.

[0146] The term “MethyLight™” refers to the art-recognized fluorescence-based real-time PCR technique described by Eads et al., Cancer Res. 59:2302-2306, 1999.

[0147] The term “HeavyMethyl™” assay, in the embodiment thereof implemented herein, refers to an assay, wherein methylation specific blocking probes (also referred to herein as blockers) covering CpG positions between, or covered by the amplification primers enable methylation-specific selective amplification of a nucleic acid sample.

[0148] The term “HeavyMethyl™ MethyLight™” assay, in the embodiment thereof implemented herein, refers to a HeavyMethyl™ MethyLight™ assay, which is a variation of the MethyLight™ assay, wherein the MethyLight™ assay is combined with methylation specific blocking probes covering CpG positions between the amplification primers.

[0149] The term “Ms-SNuPE” (Methylation-sensitive Single Nucleotide Primer Extension) refers to the art-recognized assay described by Gonzalgo & Jones, Nucleic Acids Res. 25:2529-2531, 1997.

[0150] The term “MSP” (Methylation-specific PCR) refers to the art-recognized methylation assay described by Herman et al. Proc. Natl. Acad. Sci. USA 93:9821-9826, 1996, and by U.S. Pat. No. 5,786,146.

[0151] The term “COBRA” (Combined Bisulfite Restriction Analysis) refers to the art-recognized methylation assay described by Xiong & Laird, Nucleic Acids Res. 25:2532-2534, 1997.

[0152] The term “MCA” (Methylated CpG Island Amplification) refers to the methylation assay described by Toyota et al., Cancer Res. 59:2307-12, 1999, and in WO 00/26401A1.

[0153] The term “hybridisation” is to be understood as a bond of an oligonucleotide to a complementary sequence along the lines of the Watson-Crick base pairings in the sample DNA, forming a duplex structure.

[0154] “Stringent hybridisation conditions,” as defined herein, involve hybridising at 68° C. in 5×SSC/5×Denhardt's solution/1.0% SDS, and washing in 0.2×SSC/0.1% SDS at room temperature, or involve the art-recognized equivalent thereof (e.g., conditions in which a hybridisation is carried out at 60° C. in 2.5×SSC buffer, followed by several washing steps at 37° C. in a low buffer concentration, and remains stable). Moderately stringent conditions, as defined herein, involve including washing in 3×SSC at 42° C., or the art-recognized equivalent thereof. The parameters of salt concentration and temperature can be varied to achieve the optimal level of identity between the probe and the target nucleic acid. Guidance regarding such conditions is available in the art, for example, by Sambrook et al., 1989, Molecular Cloning, A Laboratory Manual, Cold Spring Harbor Press, N.Y.; and Ausubel et al. (eds.), 1995, Current Protocols in Molecular Biology, (John Wiley & Sons, N.Y.) at Unit 2.10.

[0155] The terms “Methylation-specific restriction enzymes” or “methylation-sensitive restriction enzymes” shall be taken to mean an enzyme that selectively digests a nucleic acid dependant on the methylation state of its recognition site. In the case of such restriction enzymes which specifically cut if the recognition site is not methylated or hemimethylated, the cut will not take place, or with a significantly reduced efficiency, if the recognition site is methylated. In the case of such restriction enzymes which specifically cut if the recognition site is methylated, the cut will not take place, or with a significantly reduced efficiency if the recognition site is not methylated. Preferred are methylation-specific restriction enzymes, the recognition sequence of which contains a CG dinucleotide (for instance cgcg or cccggg). Further preferred for some embodiments are restriction enzymes that do not cut if the cytosine in this dinucleotide is methylated at the carbon atom C5. “Non-methylation-specific restriction enzymes” or “non-methylation-sensitive restriction enzymes” are restriction enzymes that cut a nucleic acid sequence irrespective of the methylation state with nearly identical efficiency. They are also called “methylation-unspecific restriction enzymes.”

[0156] In reference to composite array sequences, the phrase “contiguous nucleotides” refers to a contiguous sequence region of any individual contiguous sequence of the composite array, but does not include a region of the composite array sequence that includes a “node,” as defined herein above.

[0157] The term “gene” shall be taken to include all transcript variants thereof (e.g. the term “Septin 9” shall include for example its truncated transcript Q9HC74) and all promoter and regulatory elements thereof. Furthermore as a plurality of SNPs are known within said gene the term shall be taken to include all sequence variants thereof.

### Overview:

[0158] The present invention provides a method for detecting cell proliferative disorders (preferably colorectal carcinoma) in a subject comprising determining the expression levels of at least one gene selected from the group consisting of RASSF2, TFAP2E, SND1, PCDHGC3, EDNRB, STOM, GLI3, RXFP3, LimK1, GPR73L1, PCDH10, DOCK10 and MRPS21 in a biological sample isolated from said subject wherein underexpression and/or CpG methylation is indicative of the presence or class of said disorder. Preferably said group consists of the genes RASSF2, TFAP2E, SND1 & PCDHGC3 and/or their promotor or regulatory regions.

[0159] Said markers may be used for the diagnosis of cellular proliferative disorders (preferably cancer), most preferably colorectal carcinoma. Said method is characterized in that underexpression and/or the presence of CpG methylation is indicative of the presence of a neoplastic cell proliferative disorder or colorectal carcioma and the absence thereof is indicative of the absence thereof. It is further preferred that the expression levels of the gene SEPTIN 9 and of at least one gene selected from the group consisting of RASSF2, TFAP2E, SND1, PCDHGC3, EDNRB, STOM, GLI3, RXFP3, LimK1, GPR73L1, PCDH10, DOCK10 and MRPS21 in a biological sample isolated from said subject is determined wherein underexpression and/or CpG methylation is indicative of the presence or class of said disorder. Preferably said group consists of the genes RASSF2, TFAP2E, SND1 & PCDHGC3 and/or their promotor or regulatory regions.

[0160] Preferably a plurality of genes are analysed. Preferably 2, 3 or 4 genes are analysed. Particularly preferred are the following combinations of genes:
[0161] Septin 9+RASSF2+TFAP2E+PCDHGC3+SND1
[0162] Septin 9+RASSF2+TFAP2E+PCDHGC3
[0163] Septin 9+RASSF2+TFAP2E
[0164] Septin 9+TFAP2E+PCDHGC3
[0165] Septin 9+RASSF2
[0166] Septin 9+TFAP2E
[0167] Septin 9+PCDHGC3

[0168] The markers of the present invention are particularly efficient in detecting or distinguishing between colorectal cell proliferative disorders, thereby providing improved means for the early detection and thus improved treatment of said disorders.

[0169] In addition to the embodiments above wherein the methylation analysis of at least one gene selected from the group consisting of RASSF2, TFAP2E, SND1, PCDHGC3, EDNRB, STOM, GLI3, RXFP3, LimK1, GPR73L1, PCDH10, DOCK10 and MRPS21 is analysed, the invention presents further panels of genes comprising at least one gene selected from the group consisting of RASSF2, TFAP2E, SND1, PCDHGC3, EDNRB, STOM, GLI3, RXFP3, LimK1, GPR73L1, PCDH10, DOCK10 and MRPS21 with novel utility for the detection of cancers, in particular colorectal cancer.

[0170] Preferably said panels of genes comprise at least one gene selected from the group consisting of RASSF2, TFAP2E, SND1 & PCDHGC3 and/or their promotor or regulatory regions.

[0171] In a preferred embodiment of the method said panel comprises the gene SEPTIN 9 and at least one gene selected from the group consisting of RASSF2, TFAP2E, SND1, PCDHGC3, EDNRB, STOM, GLI3, RXFP3, LimK1, GPR73L1, PCDH10, DOCK10 and MRPS21. Preferably said group consists of the genes RASSF2, TFAP2E, SND1 & PCDHGC3 and/or their promotor or regulatory regions.

[0172] Particularly preferred are the following combinations of genes:
[0173] Septin 9+RASSF2+TFAP2E+PCDHGC3+SND1
[0174] Septin 9+RASSF2+TFAP2E+PCDHGC3
[0175] Septin 9+RASSF2+TFAP2E
[0176] Septin 9+TFAP2E+PCDHGC3
[0177] Septin 9+RASSF2
[0178] Septin 9+TFAP2E
[0179] Septin 9+PCDHGC3

[0180] In a first further embodiment the present invention is based upon the analysis of CpG methylation status of at least one gene selected from the group consisting of RASSF2, TFAP2E, SND1, PCDHGC3, EDNRB, STOM, GLI3, RXFP3, LimK1, GPR73L1, PCDH10, DOCK1 0 and MRPS21. It is preferred that the sequences of said genes are as according to Table 1. Preferably said group consists of the genes RASSF2, TFAP2E, SND1 & PCDHGC3 and/or their promotor or regulatory regions. In said embodiment it is preferred that the sequences of said genes are as according to Table 7.

[0181] Bisulfite Modification of DNA is an Art-Recognized Tool Used to Assess CpG Methylation Status.

[0182] 5-methylcytosine is the most frequent covalent base modification in the DNA of eukaryotic cells. It plays a role, for example, in the regulation of the transcription, in genetic imprinting, and in tumorigenesis. Therefore, the identification of 5-methylcytosine as a component of genetic information is of considerable interest. However, 5-methylcytosine positions cannot be identified by sequencing, because 5-methylcytosine has the same base pairing behavior as cytosine. Moreover, the epigenetic information carried by 5-methylcytosine is completely lost during, e.g., PCR amplification.

[0183] The most frequently used method for analyzing DNA for the presence of 5-methylcytosine is based upon the specific reaction of bisulfite with cytosine whereby, upon subsequent alkaline hydrolysis, cytosine is converted to uracil which corresponds to thymine in its base pairing behavior. Significantly, however, 5-methylcytosine remains unmodified under these conditions. Consequently, the original DNA is converted in such a manner that methylcytosine, which originally could not be distinguished from cytosine by its hybridization behavior, can now be detected as the only remaining cytosine using standard, art-recognized molecular biological techniques, for example, by amplification and hybridization, or by sequencing. All of these techniques are based on differential base pairing properties, which can now be fully exploited.

[0184] The prior art, in terms of sensitivity, is defined by a method comprising enclosing the DNA to be analysed in an agarose matrix, thereby preventing the diffusion and renaturation of the DNA (bisulfite only reacts with single-stranded DNA), and replacing all precipitation and purification steps with fast dialysis (Olek A, et al., A modified and improved method for bisulfite based cytosine methylation analysis, Nucleic Acids Res. 24:5064-6, 1996). It is thus possible to analyse individual cells for methylation status, illustrating the utility and sensitivity of the method. An overview of art-recognized methods for detecting 5-methylcytosine is provided by Rein, T., et al., Nucleic Acids Res., 26:2255, 1998.

[0185] The bisulfite technique, barring few exceptions (e.g., Zeschnigk M, et al., Eur J Hum Genet. 5:94-98, 1997), is currently only used in research. In all instances, short, specific fragments of a known gene are amplified subsequent to a bisulfite treatment, and either completely sequenced (Olek & Walter, Nat Genet. 1997 17:275-6, 1997), subjected to one or more primer extension reactions (Gonzalgo & Jones, Nucleic Acids Res., 25:2529-31, 1997; WO 95/00669; U.S. Pat. No. 6,251,594) to analyse individual cytosine positions, or treated by enzymatic digestion (Xiong & Laird, Nucleic Acids Res., 25:2532-4, 1997). Detection by hybridisation has also been described in the art (Olek et al., WO 99/28498). Additionally, use of the bisulfite technique for methylation detection with respect to individual genes has been described (Grigg & Clark, Bioessays, 16:431-6, 1994; Zeschnigk M, et al., Hum Mol Genet., 6:387-95, 1997; Feil R, et al., Nucleic Acids Res., 22:695-, 1994; Martin V, et al., Gene, 157:261-4, 1995; WO 9746705 and WO 9515373).

[0186] The present invention provides for the use of the bisulfite technique, in combination with one or more methylation assays, for determination of the methylation status of CpG dinucleotide sequences within at least one sequence selected from the group consisting SEQ ID NO: 1 TO SEQ ID NO: 11 AND SEQ ID NO: 132 TO SEQ ID NO: 133. Particularly preferred is the sub-group thereof consisting of SEQ ID NO: 1; SEQ ID NO: 2; SEQ ID NO: 7 & SEQ ID NO: 11.

[0187] Genomic CpG dinucleotides can be methylated or unmethylated (alternatively known as up- and down-methylated respectively). However the methods of the present invention are suitable for the analysis of biological samples of a heterogeneous nature e.g. a low concentration of tumor cells within a background of blood or stool. Accordingly, when analyzing the methylation status of a CpG position within such a sample the person skilled in the art may use a quantitative assay for determining the level (e.g. percent, fraction, ratio, proportion or degree) of methylation at a particular CpG position as opposed to a methylation state. Accordingly the term methylation status or methylation state should also be taken to mean a value reflecting the degree of methylation at a CpG position. Unless specifically stated the terms “hypermethylated” or “upmethylated” shall be taken to mean a methylation level above that of a specified cut-off point, wherein said cut-off may be a value representing the average or median methylation level for a given population, or is preferably an optimized cut-off level. The “cut-off” is also referred herein as a “threshold”. In the context of the present invention the terms “methylated”, “hypermethylated” or “upmethylated” shall be taken to include a methylation level above the cut-off be zero (0) % (or equivalents thereof) methylation for all CpG positions within and associated with (e.g. in promoter or regulatory regions) the genes or genomic sequence selected from the group consisting of RASSF2, TFAP2E, SND1, PCDHGC3, EDNRB, STOM, GLI3, RXFP3, LimK1, GPR73L1, PCDH10, DOCK10 and MRPS21 and the gene SEPTIN 9.

[0188] According to the present invention, determination of the methylation status of CpG dinucleotide sequences within SEQ ID NO: 1 TO SEQ ID NO: 11 AND SEQ ID NO: 132 TO SEQ ID NO: 133 (and more preferably the sub-group thereof consisting of SEQ ID NO: 1; SEQ ID NO: 2; SEQ ID NO: 7 & SEQ ID NO: 11) has utility both in the diagnosis and characterization of cellular proliferative disorders. Methylation Assay Procedures. Various methylation assay procedures are known in the art, and can be used in conjunction with the present invention. These assays allow for determination of the methylation state of one or a plurality of CpG dinucleotides (e.g., CpG islands) within a DNA sequence. Such assays involve, among other techniques, DNA sequencing of bisulfite-treated DNA, PCR (for sequence-specific amplification), Southern blot analysis, and use of methylation-sensitive restriction enzymes.

[0189] For example, genomic sequencing has been simplified for analysis of DNA methylation patterns and 5-methylcytosine distribution by using bisulfite treatment (Frommer et al., Proc. Natl. Acad. Sci. USA 89:1827-1831, 1992). Additionally, restriction enzyme digestion of PCR products amplified from bisulfite-converted DNA is used, e.g., the method described by Sadri & Hornsby (Nucl. Acids Res. 24:5058-5059, 1996), or COBRA (Combined Bisulfite Restriction Analysis) (Xiong & Laird, Nucleic Acids Res. 25:2532-2534, 1997).

[0190] COBRA.

[0191] COBRA™ analysis is a quantitative methylation assay useful for determining DNA methylation levels at specific gene loci in small amounts of genomic DNA (Xiong & Laird, Nucleic Acids Res. 25:2532-2534, 1997). Briefly, restriction enzyme digestion is used to reveal methylation-dependent sequence differences in PCR products of sodium bisulfite-treated DNA. Methylation-dependent sequence differences are first introduced into the genomic DNA by standard bisulfite treatment according to the procedure described by Frommer et al. (Proc. Natl. Acad. Sci. USA 89:1827-1831, 1992). PCR amplification of the bisulfite converted DNA is then performed using primers specific for the CpG islands of interest, followed by restriction endonuclease digestion, gel electrophoresis, and detection using specific, labeled hybridization probes. Methylation levels in the original DNA sample are represented by the relative amounts of digested and undigested PCR product in a linearly quantitative fashion across a wide spectrum of DNA methylation levels. In addition, this technique can be reliably applied to DNA obtained from microdissected paraffin-embedded tissue samples.

[0192] Typical reagents (e.g., as might be found in a typical COBRA™-based kit) for COBRA™ analysis may include, but are not limited to: PCR primers for specific gene (or bisulfite treated DNA sequence or CpG island); restriction enzyme and appropriate buffer; gene-hybridization oligonucleotide; control hybridization oligonucleotide; kinase labeling kit for oligonucleotide probe; and labeled nucleotides. Additionally, bisulfite conversion reagents may include: DNA denaturation buffer; sulfonation buffer; DNA recovery reagents or kits (e.g., precipitation, ultrafiltration, affinity column); desulfonation buffer; and DNA recovery components.

[0193] Preferably, assays such as “MethyLight™” (a fluorescence-based real-time PCR technique) (Eads et al., Cancer Res. 59:2302-2306, 1999), Ms-SNuPE™ (Methylation-sensitive Single Nucleotide Primer Extension) reactions (Gonzalgo & Jones, Nucleic Acids Res. 25:2529-2531, 1997), methylation-specific PCR (“MSP”; Herman et al., Proc. Natl. Acad. Sci. USA 93:9821-9826, 1996; U.S. Pat. No. 5,786,146), and methylated CpG island amplification (“MCA”; Toyota et al., Cancer Res. 59:2307-12, 1999) are used alone or in combination with other of these methods.

[0194] The “HeavyMethyl™” assay, technique is a quantitative method for assessing methylation differences based on methylation specific amplification of bisulfite treated DNA. Methylation specific blocking probes (also referred to herein as blockers) covering CpG positions between, or covered by the amplification primers enable methylation-specific selective amplification of a nucleic acid sample.

[0195] The term “HeavyMethyl™ MethyLight™” assay, in the embodiment thereof implemented herein, refers to a HeavyMethyl™ MethyLight™ assay, which is a variation of the MethyLight™ assay, wherein the MethyLight™ assay is combined with methylation specific blocking probes covering CpG positions between the amplification primers. The HeavyMethyl™ assay may also be used in combination with methylation specific amplification primers.

[0196] Typical reagents (e.g., as might be found in a typical MethyLight□-based kit) for HeavyMethyl™ analysis may include, but are not limited to: PCR primers for specific genes (or bisulfite treated DNA sequence or CpG island); blocking oligonucleotides; optimized PCR buffers and deoxynucleotides; and Taq polymerase.

[0197] MSP.

[0198] MSP (methylation-specific FOR) allows for assessing the methylation status of virtually any group of CpG sites within a CpG island, independent of the use of methylation-sensitive restriction enzymes (Herman et al. Proc. Natl. Acad. Sci. USA 93:9821-9826, 1996; U.S. Pat. No. 5,786,146). Briefly, DNA is modified by sodium bisulfite converting all unmethylated, but not methylated cytosines to uracil, and subsequently amplified with primers specific for methylated versus unmethylated DNA. MSP requires only small quantities of DNA, is sensitive to 0.1% methylated alleles of a given CpG island locus, and can be performed on DNA extracted from paraffin-embedded samples. Typical reagents (e.g., as might be found in a typical MSP-based kit) for MSP analysis may include, but are not limited to: methylated and unmethylated PCR primers for specific gene (or bisulfite treated DNA sequence or CpG island), optimized PCR buffers and deoxynucleotides, and specific probes.

[0199] MethyLight™.

[0200] The MethyLight™ assay is a high-throughput quantitative methylation assay that utilizes fluorescence-based real-time FOR (TagMan□) technology that requires no further manipulations after the PCR step (Eads et al., Cancer Res. 59:2302-2306, 1999). Briefly, the MethyLight™ process begins with a mixed sample of genomic DNA that is converted, in a sodium bisulfite reaction, to a mixed pool of methylation-dependent sequence differences according to standard procedures (the bisulfite process converts unmethylated cytosine residues to uracil). Fluorescence-based PCR is then performed in a “biased” (with PCR primers that overlap known CpG dinucleotides) reaction. Sequence discrimination can occur both at the level of the amplification process and at the level of the fluorescence detection process.

[0201] The MethyLight™ assay may be used as a quantitative test for methylation patterns in the genomic DNA sample, wherein sequence discrimination occurs at the level of probe hybridization. In this quantitative version, the PCR reaction provides for a methylation specific amplification in the presence of a fluorescent probe that overlaps a particular putative methylation site. An unbiased control for the amount of input DNA is provided by a reaction in which neither the primers, nor the probe overlie any CpG dinucleotides. Alternatively, a qualitative test for genomic methylation is achieved by probing of the biased PCR pool with either control oligonucleotides that do not “cover” known methylation sites (a fluorescence-based version of the HeavyMethyl™ and MSP techniques), or with oligonucleotides covering potential methylation sites.

[0202] The MethyLight™ process can by used with any suitable probes e.g. “TaqMan®”, Lightcycler® etc. . . . For example, double-stranded genomic DNA is treated with sodium bisulfite and subjected to one of two sets of PCR reactions using TaqMan® probes; e.g., with MSP primers and/or HeavyMethyl blocker oligonucleotides and TaqMan® probe. The TaqMan® probe is dual-labeled with fluorescent “reporter” and “quencher” molecules, and is designed to be specific for a relatively high GC content region so that it melts out at about 10° C. higher temperature in the PCR cycle than the forward or reverse primers. This allows the TaqMan® probe to remain fully hybridized during the PCR annealing/extension step. As the Taq polymerase enzymatically synthesizes a new strand during PCR, it will eventually reach the annealed TaqMan® probe. The Taq polymerase 5′ to 3′ endonuclease activity will then displace the TaqMan® probe by digesting it to release the fluorescent reporter molecule for quantitative detection of its now unquenched signal using a real-time fluorescent detection system.

[0203] Typical reagents (e.g., as might be found in a typical MethyLight□-based kit) for MethyLight™ analysis may include, but are not limited to: PCR primers for specific gene (or bisulfite treated DNA sequence or CpG island); TaqMan® or Lightcycler® probes; optimized PCR buffers and deoxynucleotides; and Taq polymerase.

[0204] The QM™ (quantitative methylation) assay is an alternative quantitative test for methylation patterns in genomic DNA samples, wherein sequence discrimination occurs at the level of probe hybridization. In this quantitative version, the PCR reaction provides for unbiased amplification in the presence of a fluorescent probe that overlaps a particular putative methylation site. An unbiased control for the amount of input DNA is provided by a reaction in which neither the primers, nor the probe overlie any CpG dinucleotides. Alternatively, a qualitative test for genomic methylation is achieved by probing of the biased PCR pool with either control oligonucleotides that do not “cover” known methylation sites (a fluorescence-based version of the HeavyMethyl™ and MSP techniques), or with oligonucleotides covering potential methylation sites.

[0205] The QM™ process can by used with any suitable probes e.g. “TaqMan®”, Lightcycler® etc. . . . in the amplification process. For example, double-stranded genomic DNA is treated with sodium bisulfite and subjected to unbiased primers and the TaqMan® probe. The TaqMan® probe is dual-labeled with fluorescent “reporter” and “quencher” molecules, and is designed to be specific for a relatively high GC content region so that it melts out at about 10° C. higher temperature in the PCR cycle than the forward or reverse primers. This allows the TaqMan® probe to remain fully hybridized during the PCR annealing/extension step. As the Taq polymerase enzymatically synthesizes a new strand during PCR, it will eventually reach the annealed TaqMan® probe. The Taq polymerase 5′ to 3′ endonuclease activity will then displace the TaqMan® probe by digesting it to release the fluorescent reporter molecule for quantitative detection of its now unquenched signal using a real-time fluorescent detection system.

[0206] Typical reagents (e.g., as might be found in a typical QM™-based kit) for QM™ analysis may include, but are not limited to: PCR primers for specific gene (or bisulfite treated DNA sequence or CpG island); TaqMan® or Lightcycler® probes; optimized PCR buffers and deoxynucleotides; and Taq polymerase.

[0207] Ms-SNuPE.

[0208] The Ms-SNuPE™ technique is a quantitative method for assessing methylation differences at specific CpG sites based on bisulfite treatment of DNA, followed by single-nucleotide primer extension (Gonzalgo & Jones, Nucleic Acids Res. 25:2529-2531, 1997). Briefly, genomic DNA is reacted with sodium bisulfite to convert unmethylated cytosine to uracil while leaving 5-methylcytosine unchanged. Amplification of the desired target sequence is then performed using PCR primers specific for bisulfite-converted DNA, and the resulting product is isolated and used as a template for methylation analysis at the CpG site(s) of interest. Small amounts of DNA can be analyzed (e.g., microdissected pathology sections), and it avoids utilization of restriction enzymes for determining the methylation status at CpG sites.

[0209] Typical reagents (e.g., as might be found in a typical Ms-SNuPE™-based kit) for Ms-SNuPE™ analysis may include, but are not limited to: PCR primers for specific gene (or bisulfite treated DNA sequence or CpG island); optimized PCR buffers and deoxynucleotides; gel extraction kit; positive control primers; Ms-SNuPE™ primers for specific gene; reaction buffer (for the Ms-SNuPE reaction); and labelled nucleotides. Additionally, bisulfite conversion reagents may include: DNA denaturation buffer; sulfonation buffer; DNA recovery regents or kit (e.g., precipitation, ultrafiltration, affinity column); desulfonation buffer; and DNA recovery components.

[0210] The Genomic Sequence According to SEQ ID NO: 1 TO SEQ ID NO: 11 AND SEQ ID NO: 132 TO SEQ ID NO: 133 (and more preferably the sub-group thereof consisting of SEQ ID NO: 1; SEQ ID NO: 2; SEQ ID NO: 7 & SEQ ID NO: 11), and Non-naturally Occurring Treated Variants Thereof According to SEQ ID NO: 15 TO SEQ ID NO: 36 AND SEQ ID NO: 43 TO SEQ ID NO: 64 AND SEQ ID NO: 134 TO SEQ ID NO: 141 (and more preferably the sub-group thereof consisting of SEQ ID NOS: 15, 16, 43, 44, 17, 18, 45, 46, 27, 28, 55, 56, 35 36 63 & 64), were Determined to have Novel Utility for the Early Detection of Cellular Proliferative Disorders, in Particular Colorectal Cell Proliferative Disorders

[0211] In one embodiment the invention of the method comprises the following steps: i) contacting genomic DNA (preferably isolated from body fluids) obtained from the subject with at least one reagent, or series of reagents that distinguishes between methylated and non-methylated CpG dinucleotides within at least one gene selected from the group consisting of RASSF2, TFAP2E, SND1, PCDHGC3, EDNRB, STOM, GLI3, RXFP3, LimK1, GPR73L1, PCDH10, DOCK10 and MRPS21 (including their promoter and regulatory regions); and ii) detecting, or detecting and distinguishing between or among colon cell proliferative disorders. In a preferred embodiment the accuracy of said method is increased by additionally determining the methylation status of the gene SEPTIN 9 by means of said method steps. Preferably said group consists of the genes RASSF2, TFAP2E, SND1 & PCDHGC3 and/or their promotor or regulatory regions.

[0212] Particularly preferred are the following combinations of genes:
[0213] Septin 9+RASSF2+TFAP2E+PCDHGC3+SND1
[0214] Septin 9+RASSF2+TFAP2E+PCDHGC3
[0215] Septin 9+RASSF2+TFAP2E
[0216] Septin 9+TFAP2E+PCDHGC3
[0217] Septin 9+RASSF2
[0218] Septin 9+TFAP2E
   [0219] Septin 9+PCDHGC3

[0220] Preferably, the sensitivity is from about 75% to about 96%, or from about 80% to about 90%, or from about 80% to about 85%. Preferably, the specificity is from about 75% to about 96%, or from about 80% to about 90%, or from about 80% to about 85%.

[0221] Genomic DNA may be isolated by any means standard in the art, including the use of commercially available kits. Briefly, wherein the DNA of interest is encapsulated in by a cellular membrane the biological sample must be disrupted and lysed by enzymatic, chemical or mechanical means. The DNA solution may then be cleared of proteins and other contaminants, e.g., by digestion with proteinase K. The genomic DNA is then recovered from the solution. This may be carried out by means of a variety of methods including salting out, organic extraction or binding of the DNA to a solid phase support. The choice of method will be affected by several factors including time, expense and required quantity of DNA. All clinical sample types comprising cellular matter are suitable for us e in the present method, preferred are cell lines, histological slides, biopsies, paraffin-embedded tissue, body fluids, stool, colonic effluent, urine, blood plasma, blood serum, whole blood, isolated blood cells, cells isolated from the blood and combinations thereof. Body fluids are the preferred source of the DNA; particularly preferred are blood plasma, blood serum, whole blood, isolated blood cells and cells isolated from the blood.

[0222] The genomic DNA sample is then treated with at least one reagent, or series of reagents that distinguishes between methylated and non-methylated CpG dinucleotides within at least one target region of the genomic DNA, wherein the target region comprises, or hybridizes under stringent conditions to a sequence of at least 16 contiguous nucleotides of at least one sequence selected from the group consisting of SEQ ID NO: 1 TO SEQ ID NO: 11 AND SEQ ID NO: 132 TO SEQ ID NO: 133 (and more preferably the sub-group thereof consisting of SEQ ID NO: 1; SEQ ID NO: 2; SEQ ID NO: 7 & SEQ ID NO: 11) respectively, wherein said contiguous nucleotides comprise at least one CpG dinucleotide sequence. It is further preferred that said reagent, or series of reagents distinguishes between methylated and non-methylated CpG dinucleotides within at least two target regions of the genomic DNA, wherein a first the target region comprises, or hybridizes under stringent conditions to a sequence of at least 16 contiguous nucleotides of at least one sequence selected from the group consisting of SEQ ID NO: 12 TO SEQ ID NO: 14 and a second target region that comprises, or hybridizes under stringent conditions to a sequence of at least 16 contiguous nucleotides of at least one sequence selected from the group consisting of SEQ ID NO: 1 TO SEQ ID NO: 11 AND SEQ ID NO: 132 TO SEQ ID NO: 133 (and more preferably the sub-group thereof consisting of SEQ ID NO: 1; SEQ ID NO: 2; SEQ ID NO: 7 & SEQ ID NO: 11), wherein said contiguous nucleotides comprise at least one CpG dinucleotide sequence.

[0223] It is particularly preferred that said reagent converts cytosine bases which are unmethylated at the 5′-position to uracil, thymine, or another base which is dissimilar to cytosine in terms of hybridisation behaviour. However in an alternative embodiment said reagent may be a methylation sensitive restriction enzyme.

[0224] Wherein the genomic DNA sample is treated in such a manner that cytosine bases which are unmethylated at the 5′-position are converted to uracil, thymine, or another base which is dissimilar to cytosine in terms of hybridization behavior It is preferred that this treatment is carried out with bisulfite (hydrogen sulfite, disulfite) and subsequent alkaline hydrolysis. Such a treatment results in the conversion of SEQ ID NO: 1-SEQ ID NO: 14 to SEQ ID NO: 43-SEQ ID NO: 70 wherein said CpG dinucleotides are unmethylated and to SEQ ID NO: 15-SEQ ID NO: 42 wherein said CpG dinucleotides are methylated.

[0225] The treated DNA is then analysed in order to determine the methylation state of the target gene sequences (at least one gene selected from the group consisting of RASSF2, TFAP2E, SND1, PCDHGC3, EDNRB, STOM, GLI3, RXFP3, LimK1, GPR73L1, PCDH10, DOCK10 and MRPS21 prior to the treatment). It is particularly preferred that the target region comprises, or hybridizes under stringent conditions to at least 16 contiguous nucleotides of at least one gene selected from the group consisting of RASSF2, TFAP2E, SND1, PCDHGC3, EDNRB, STOM, GLI3, RXFP3, LimK1, GPR73L1, PCDH10, DOCK10 and MRPS21. It is preferred that the sequence of said genes according to SEQ ID NO: 1 TO SEQ ID NO: 11 AND SEQ ID NO: 132 TO SEQ ID NO: 133 are analysed.

[0226] It is further preferred that said group consists of the genes RASSF2, TFAP2E, SND1 & PCDHGC3 and/or their promotor or regulatory regions. In said embodiment it is preferred that the sequence of said genes according to SEQ ID NO: 1; SEQ ID NO: 2; SEQ ID NO: 7 & SEQ ID NO: 11 are analysed.

[0227] The method of analysis may be selected from those known in the art, including those listed herein. Particularly preferred are MethyLight™, MSP and the use of blocking oligonucleotides (HeavyMethyl™) as described herein. It is further preferred that any oligonucleotides used in such analysis (including primers, blocking oligonucleotides and detection probes) should be reverse complementary, identical, or hybridise under stringent or highly stringent conditions to an at least 16-base-pair long segment of the base sequences of one or more of SEQ ID NO: 15 TO SEQ ID NO: 36 AND SEQ ID NO: 43 TO SEQ ID NO: 64 AND SEQ ID NO: 134 TO SEQ ID NO: 141 (and more preferably the sub-group thereof consisting of SEQ ID NOS: 15, 16, 43, 44, 17, 18, 45, 46, 27, 28, 55, 56, 35 36 63 & 64) and sequences complementary thereto.

[0228] Aberrant methylation, more specifically hypermethylation of the genes or genomic sequence selected from the group consisting of RASSF2, TFAP2E, SND1, PCDHGC3, EDNRB, STOM, GLI3, RXFP3, LimK1, GPR73L1, PCDH10, DOCK10 and MRPS21 (including their promoter and/or regulatory regions) is associated with the presence of neoplastic cellular proliferative disorders, and is particularly prevalent in colorectal carcinomas. Accordingly wherein a biological sample presents within any degree of methylation, said sample should be determined as cancerous.

[0229] Analysis of one the genes or genomic sequence selected from the group consisting of RASSF2, TFAP2E, SND1, PCDHGC3, EDNRB, STOM, GLI3, RXFP3, LimK1, GPR73L1, PCDH10, DOCK10 and MRPS21 enables for the first time detecting, or detecting and distinguishing between or among colon cell proliferative disorders afforded with a sensitivity of greater than or equal to 80% and a specificity of greater than or equal to 80%. Preferably said group consists of the genes RASSF2, TFAP2E, SND1 & PCDHGC3 and/or their promotor or regulatory regions.

[0230] Sensitivity is calculated as: {detected neoplasia/all neoplasia) e.g.: {detected colon neoplasia/all colon neoplasia); and specificity is calculated as (non-detected negatives/total negatives)

[0231] Preferably, the sensitivity is from about 75% to about 96%, or from about 80% to about 90%, or from about 80% to about 85%. Preferably, the specificity is from about 75% to about 96%, or from about 80% to about 90%, or from about 80% to about 85%.

[0232] Colon neoplasia is herein defined as all colon malignancies and adenomas greater than 1 cm., or subsets thereof. Negatives can be defined as healthy individuals.

[0233] In one embodiment the method discloses the use of at least one gene selected from the group consisting of RASSF2, TFAP2E, SND1, PCDHGC3, EDNRB, STOM, GLI3, RXFP3, LimK1, GPR73L1, PCDH10, DOCK10 and MRPS21 (or promoter and/or regulatory regions thereof) as a marker for the detection of cellular proliferative disorders (in particular colon disorders). Preferably said group consists of the genes RASSF2, TFAP2E, SND1 & PCDHGC3 and/or their promotor or regulatory regions. Said method may be enabled by means of any analysis of the expression of an RNA transcribed therefrom or polypeptide or protein translated from said RNA, preferably by means of mRNA expression analysis or polypeptide expression analysis. Accordingly the present invention also provides diagnostic assays and methods, both quantitative and qualitative for detecting the expression of at least one gene selected from the group consisting of RASSF2, TFAP2E, SND1, PCDHGC3, EDNRB, STOM, GLI3, RXFP3, LimK1, GPR73L1, PCDH10, DOCK10 and MRPS21 in a subject and determining therefrom upon the presence or absence of cancer in said subject. The invention further provides. diagnostic assays and methods, both quantitative and qualitative for detecting the expression of the gene SEPTIN 9 in combination with at least one gene selected from the group consisting of RASSF2, TFAP2E, SND1, PCDHGC3, EDNRB, STOM, GLI3, RXFP3, LimK1, GPR73L1, PCDH10, DOCK10 and MRPS21 in a subject and determining therefrom upon the presence or absence of cancer in said subject.

[0234] Particularly preferred are the following combinations of genes:
[0235] Septin 9+RASSF2+TFAP2E+PCDHGC3+SND1
[0236] Septin 9+RASSF2+TFAP2E+PCDHGC3
[0237] Septin 9+RASSF2+TFAP2E
[0238] Septin 9+TFAP2E+PCDHGC3
[0239] Septin 9+RASSF2
[0240] Septin 9+TFAP2E
[0241] Septin 9+PCDHGC3

[0242] Aberrant expression of mRNA transcribed from the genes or genomic sequences selected from the group consisting of RASSF2, TFAP2E, SND1, PCDHGC3, EDNRB, STOM, GLI3, RXFP3, LimK1, GPR73L1, PCDH10, DOCK10 and MRPS21 are associated with the presence of cancer in a subject. Preferably said group consists of the genes SND1; PCDHGC3 & RASSF2.

[0243] According to the present invention, under expression (and/or presence methylation) is associated with the presence of cancer, and vice versa over-expression (and/or absence of methylation) is associated with the absence of cancer.

[0244] To detect the presence of mRNA encoding a gene, a sample is obtained from a patient. The sample may be any suitable sample comprising cellular matter of the tumour. Suitable sample types include cell lines, histological slides, biopsies, paraffin-embedded tissue, body fluids, stool, colonic effluent, urine, blood plasma, blood serum, whole blood, isolated blood cells, cells isolated from the blood and all possible combinations thereof. It is preferred that said sample types are stool or body fluids selected from the group consisting colonic effluent, urine, blood plasma, blood serum, whole blood, isolated blood cells, cells isolated from the blood.

[0245] The sample may be treated to extract the RNA contained therein. The resulting nucleic acid from the sample is then analysed. Many techniques are known in the state of the art for determining absolute and relative levels of gene expression, commonly used techniques suitable for use in the present invention include in situ hybridisation (e.g. FISH), Northern analysis, RNase protection assays (RPA), microarrays and PCR-based techniques, such as quantitative PCR and differential display PCR or any other nucleic acid detection method.

[0246] Particularly preferred is the use of the reverse transcription/polymerisation chain reaction technique (RT-PCR). The method of RT-PCR is well known in the art (for example, see Watson and Fleming, supra).

[0247] The RT-PCR method can be performed as follows. Total cellular RNA is isolated by, for example, the standard guanidium isothiocyanate method and the total RNA is reverse transcribed. The reverse transcription method involves synthesis of DNA on a template of RNA using a reverse transcriptase enzyme and a 3′ end oligonucleotide dT primer and/or random hexamer primers. The cDNA thus produced is then amplified by means of PCR. (Belyaysky et al, Nucl Acid Res 17:2919-2932, 1989; Krug and Berger, Methods in Enzymology, Academic Press, N.Y., Vol. 152, pp. 316-325, 1987 which are incorporated by reference). Further preferred is the “Real-time” variant of RT-PCR, wherein the PCR product is detected by means of hybridisation probes (e.g. TaqMan, Lightcycler, Molecular Beacons & Scorpion) or SYBR green. The detected signal from the probes or SYBR green is then quantitated either by reference to a standard curve or by comparing the Ct values to that of a calibration standard. Analysis of housekeeping genes is often used to normalize the results.

[0248] In Northern blot analysis total or poly(A)+mRNA is run on a denaturing agarose gel and detected by hybridisation to a labelled probe in the dried gel itself or on a membrane. The resulting signal is proportional to the amount of target RNA in the RNA population.

[0249] Comparing the signals from two or more cell populations or tissues reveals relative differences in gene expression levels. Absolute quantitation can be performed by comparing the signal to a standard curve generated using known amounts of an in vitro transcript corresponding to the target RNA. Analysis of housekeeping genes, genes whose expression levels are expected to remain relatively constant regardless of conditions, is often used to normalize the results, eliminating any apparent differences caused by unequal transfer of RNA to the membrane or unequal loading of RNA on the gel.

[0250] The first step in Northern analysis is isolating pure, intact RNA from the cells or tissue of interest. Because Northern blots distinguish RNAs by size, sample integrity influences the degree to which a signal is localized in a single band. Partially degraded RNA samples will result in the signal being smeared or distributed over several bands with an overall loss in sensitivity and possibly an erroneous interpretation of the data. In Northern blot analysis, DNA, RNA and oligonucleotide probes can be used and these probes are preferably labelled (e.g. radioactive labels, mass labels or fluorescent labels). The size of the target RNA, not the probe, will determine the size of the detected band, so methods such as random-primed labelling, which generates probes of variable lengths, are suitable for probe synthesis. The specific activity of the probe will determine the level of sensitivity, so it is preferred that probes with high specific activities, are used.

[0251] In an RNase protection assay, the RNA target and an RNA probe of a defined length are hybridised in solution. Following hybridisation, the RNA is digested with RNases specific for single-stranded nucleic acids to remove any unhybridized, single-stranded target RNA and probe. The RNases are inactivated, and the RNA is separated e.g. by denaturing polyacrylamide gel electrophoresis. The amount of intact RNA probe is proportional to the amount of target RNA in the RNA population. RPA can be used for relative and absolute quantitation of gene expression and also for mapping RNA structure, such as intron/exon boundaries and transcription start sites. The RNase protection assay is preferable to Northern blot analysis as it generally has a lower limit of detection.

[0252] The antisense RNA probes used in RPA are generated by in vitro transcription of a DNA template with a defined endpoint and are typically in the range of 50-600 nucleotides. The use of RNA probes that include additional sequences not homologous to the target RNA allows the protected fragment to be distinguished from the full-length probe. RNA probes are typically used instead of DNA probes due to the ease of generating single-stranded RNA probes and the reproducibility and reliability of RNA:RNA duplex digestion with RNases (Ausubel et al. 2003), particularly preferred are probes with high specific activities.

[0253] Particularly preferred is the use of microarrays. The microarray analysis process can be divided into two main parts. First is the immobilization of known gene sequences onto glass slides or other solid support followed by hybridisation of the fluorescently labelled cDNA (comprising the sequences to be interrogated) to the known genes immobilized on the glass slide (or other solid phase). After hybridisation, arrays are scanned using a fluorescent microarray scanner. Analysing the relative fluorescent intensity of different genes provides a measure of the differences in gene expression.

[0254] DNA arrays can be generated by immobilizing presynthesized oligonucleotides onto prepared glass slides or other solid surfaces. In this case, representative gene sequences are manufactured and prepared using standard oligonucleotide synthesis and purification methods. These synthesized gene sequences are complementary to the RNA transcript(s) of the genes of interest (in this case the genes or genomic sequences selected from the group consisting of RASSF2, TFAP2E, SND1, PCDHGC3, EDNRB, STOM, GLI3, RXFP3, LimK1, GPR73L1, PCDH10, DOCK10 and MRPS21, AND PREFERABLY Septin 9) and tend to be shorter sequences in the range of 25-70 nucleotides. Alternatively, immobilized oligos can be chemically synthesized in situ on the surface of the slide. In situ oligonucleotide synthesis involves the consecutive addition of the appropriate nucleotides to the spots on the microarray; spots not receiving a nucleotide are protected during each stage of the process using physical or virtual masks. Preferably said synthesized nucleic acids are locked nucleic acids

[0255] In expression profiling microarray experiments, the RNA templates used are representative of the transcription profile of the cells or tissues under study. RNA is first isolated from the cell populations or tissues to be compared. Each RNA sample is then used as a template to generate fluorescently labelled cDNA via a reverse transcription reaction. Fluorescent labelling of the cDNA can be accomplished by either direct labelling or indirect labelling methods. During direct labelling, fluorescently modified nucleotides (e.g., Cy®3- or Cy®5-dCTP) are incorporated directly into the cDNA during the reverse transcription. Alternatively, indirect labelling can be achieved by incorporating aminoallyl-modified nucleotides during cDNA synthesis and then conjugating an N-hydroxysuccinimide (NHS)-ester dye to the aminoallyl-modified cDNA after the reverse transcription reaction is complete. Alternatively, the probe may be unlabelled, but may be detectable by specific binding with a ligand which is labelled, either directly or indirectly. Suitable labels and methods for labelling ligands (and probes) are known in the art, and include, for example, radioactive labels which may be incorporated by known methods (e.g., nick translation or kinasing). Other suitable labels include but are not limited to biotin, fluorescent groups, chemiluminescent groups (e.g., dioxetanes, particularly triggered dioxetanes), enzymes, antibodies, and the like. To perform differential gene expression analysis, cDNA generated from different RNA samples are labelled with Cy® 3. The resulting labelled cDNA is purified to remove unincorporated nucleotides, free dye and residual RNA. Following purification, the labelled cDNA samples are hybridised to the microarray. The stringency of hybridisation is determined by a number of factors during hybridisation and during the washing procedure, including temperature, ionic strength, length of time and concentration of formamide. These factors are outlined in, for example, Sambrook et al. (Molecular Cloning: A Laboratory Manual, 2nd ed., 1989). The microarray is scanned post-hybridisation using a fluorescent microarray scanner. The fluorescent intensity of each spot indicates the level of expression of the analysed gene; bright spots correspond to strongly expressed genes, while dim spots indicate weak expression.

[0256] Once the images are obtained, the raw data must be analysed. First, the background fluorescence must be subtracted from the fluorescence of each spot. The data is then normalized to a control sequence, such as exogenously added nucleic acids (preferably RNA or DNA), or a housekeeping gene panel to account for any non-specific hybridisation, array imperfections or variability in the array set-up, cDNA labelling, hybridisation or washing. Data normalization allows the results of multiple arrays to be compared.

[0257] Another aspect of the invention relates to a kit for use in diagnosis of cancer in a subject according to the methods of the present invention, said kit comprising: a means for measuring the level of transcription of genes or genomic sequences selected from the group consisting of RASSF2, TFAP2E, SND1, PCDHGC3, EDNRB, STOM, GLI3, RXFP3, LimK1, GPR73L1, PCDH10, DOCK10 and MRPS21. Preferably said group consists of the genes RASSF2, TFAP2E, SND1 & PCDHGC3 and/or their promotor or regulatory regions.

[0258] In a preferred embodiment the means for measuring the level of transcription comprise oligonucleotides or polynucleotides able to hybridise under stringent or moderately stringent conditions to the transcription products of a gene selected from the group consisting of RASSF2, TFAP2E, SND1, PCDHGC3, EDNRB, STOM, GLI3, RXFP3, LimK1, GPR73L1, PCDH10, DOCK10 and MRPS21. Preferably said group consists of the genes RASSF2, TFAP2E, SND1 & PCDHGC3 and/or their promotor or regulatory regions.

[0259] It is further preferred that said kit further comprises means for measuring the level of transcription of the gene Septin 9 comprising oligonucleotides or polynucleotides able to hybridise under stringent or moderately stringent conditions to the transcription products of said gene. In one embodiment said oligonucleotides or polynucleotides comprise at least 9, 18 or 25 bases of a sequence complementary to or hybridising to said transcription product.

[0260] In a most preferred embodiment the level of transcription is determined by techniques selected from the group of Northern Blot analysis, reverse transcriptase PCR, real-time PCR, RNAse protection, and microarray. In another embodiment of the invention the kit further comprises means for obtaining a biological sample of the patient. Preferred is a kit, which further comprises a container which is most preferably suitable for containing the means for measuring the level of transcription and the biological sample of the patient, and most preferably further comprises instructions for use and interpretation of the kit results.

[0261] In a preferred embodiment the kit comprises (a) a plurality of oligonucleotides or polynucleotides able to hybridise under stringent or moderately stringent conditions to the transcription products of at least one gene selected from the group consisting of RASSF2, TFAP2E, SND1, PCDHGC3, EDNRB, STOM, GLI3, RXFP3, LimK1, GPR73L1, PCDH10, DOCK10 and MRPS21; (b) a container, preferably suitable for containing the oligonucleotides or polynucleotides and a biological sample of the patient comprising the transcription products wherein the oligonucleotides or polynucleotides can hybridise under stringent or moderately stringent conditions to the transcription products, (c) means to detect the hybridisation of (b); and optionally, (d) instructions for use and interpretation of the kit results. It is further preferred that said oligonucleotides or polynucleotides of (a) comprise in each case at least 9, 18 or 25 bases of a sequence complementary to or hybridising to the transcription products of a gene selected from the group consisting of RASSF2, TFAP2E, SND1, PCDHGC3, EDNRB, STOM, GLI3, RXFP3, LimK1, GPR73L1, PCDH10, DOCK10 and MRPS21 and sequences complementary thereto. Preferably said group consists of the genes RASSF2, TFAP2E, SND1 & PCDHGC3 and/or their promotor or regulatory regions. It is further preferred that said kit comprises (e) a plurality of oligonucleotides or polynucleotides able to hybridise under stringent or moderately stringent conditions to the transcription products of the gene Septin 9. Said oligonucleotides or polynucleotides of (e) preferably comprise in each case at least 9, 18 or 25 bases of a sequence complementary to or hybridising to a Septin 9 transcription products.

[0262] The kit may also contain other components such as hybridisation buffer (where the oligonucleotides are to be used as a probe) packaged in a separate container. Alternatively, where the oligonucleotides are to be used to amplify a target region, the kit may contain, packaged in separate containers, a polymerase and a reaction buffer optimised for primer extension mediated by the polymerase, such as PCR. Preferably said polymerase is a reverse transcriptase. It is further preferred that said kit further contains an Rnase reagent.

[0263] The present invention further provides for methods for the detection of the presence of the polypeptide encoded by said gene sequences in a sample obtained from a patient.

[0264] Aberrant levels of polypeptide expression of the polypeptides encoded by the genes or genomic sequences selected from the group consisting of RASSF2, TFAP2E, SND1, PCDHGC3, EDNRB, STOM, GLI3, RXFP3, LimK1, GPR73L1, PCDH10, DOCK10 and MRPS21 are associated with the presence of cancer. The accuracy of the diagnosis of colorectal cancer is increased when polypeptides of the gene Septin 9 are analysed in combination with said aforenmentioned polypeptides.

[0265] According to the present invention, under expression of said polypeptides is associated with the presence of cancer.

[0266] Any method known in the art for detecting polypeptides can be used. Such methods include, but are not limited to mass-spectrometry, immunodiffusion, immunoelectrophoresis, immunochemical methods, binder-ligand assays, immunohistochemical techniques, agglutination and complement assays (e.g., see Basic and Clinical Immunology, Sites and Terr, eds., Appleton & Lange, Norwalk, Conn. pp 217-262, 1991 which is incorporated by reference). Preferred are binder-ligand immunoassay methods including reacting antibodies with an epitope or epitopes and competitively displacing a labelled polypeptide or derivative thereof.

[0267] Certain embodiments of the present invention comprise the use of antibodies specific to the polypeptide encoded by a gene selected from the group consisting of RASSF2, TFAP2E, SND1, PCDHGC3, EDNRB, STOM, GLI3, RXFP3, LimK1, GPR73L1, PCDH10, DOCK10 and MRPS21. Preferably said group consists of the genes RASSF2, TFAP2E, SND1 & PCDHGC3. Further embodiments of the present invention comprise the use of a first species of antibodies specific to the polypeptide encoded by the gene SEPTIN 9 and a second species of antibodies specific to the polypeptide encoded by a gene selected from the group consisting of RASSF2, TFAP2E, SND1, PCDHGC3, EDNRB, STOM, GLI3, RXFP3, LimK1, GPR73L1, PCDH10, DOCK10 and MRPS21. Preferably said asecond species of antibodies is specific to the polypeptide encoded by a gene selected from the group consisting of RASSF2, TFAP2E, SND1 & PCDHGC3.

[0268] Such antibodies are useful for cancer diagnosis. In certain embodiments production of monoclonal or polyclonal antibodies can be induced by the use of an epitope encoded by a polypeptide encoded by a gene selected from the group consisting of RASSF2, TFAP2E, SND1, PCDHGC3, EDNRB, STOM, GLI3, RXFP3, LimK1, GPR73L1, PCDH10, DOCK10 and MRPS21 as an antigene. Preferably said group consists of the genes RASSF2, TFAP2E, SND1 & PCDHGC3. Such antibodies may in turn be used to detect expressed polypeptides as markers for cancer diagnosis. The levels of such polypeptides present may be quantified by conventional methods. Antibody-polypeptide binding may be detected and quantified by a variety of means known in the art, such as labelling with fluorescent or radioactive ligands. The invention further comprises kits for performing the above-mentioned procedures, wherein such kits contain antibodies specific for the investigated polypeptides.

[0269] Numerous competitive and non-competitive polypeptide binding immunoassays are well known in the art. Antibodies employed in such assays may be unlabelled, for example as used in agglutination tests, or labelled for use a wide variety of assay methods. Labels that can be used include radionuclides, enzymes, fluorescers, chemiluminescers, enzyme substrates or co-factors, enzyme inhibitors, particles, dyes and the like. Preferred assays include but are not limited to radioimmunoassay (RIA), enzyme immunoassays, e.g., enzyme-linked immunosorbent assay (ELISA), fluorescent immunoassays and the like. Polyclonal or monoclonal antibodies or epitopes thereof can be made for use in immunoassays by any of a number of methods known in the art.

[0270] In an alternative embodiment of the method the proteins may be detected by means of western blot analysis. Said analysis is standard in the art, briefly proteins are separated by means of electrophoresis e.g. SDS-PAGE. The separated proteins are then transferred to a suitable membrane (or paper) e.g. nitrocellulose, retaining the spacial separation achieved by electrophoresis. The membrane is then incubated with a blocking agent to bind remaining sticky places on the membrane, commonly used agents include generic protein (e.g. milk protein). An antibody specific to the protein of interest is then added, said antibody being detectably labelled for example by dyes or enzymatic means (e.g. alkaline phosphatase or horseradish peroxidase). The location of the antibody on the membrane is then detected.

[0271] In an alternative embodiment of the method the proteins may be detected by means of immunohistochemistry (the use of antibodies to probe specific antigens in a sample). Said analysis is standard in the art, wherein detection of antigens in tissues is known as immunohistochemistry, while detection in cultured cells is generally termed immunocytochemistry. Briefly the primary antibody to be detected by binding to its specific antigen. The antibody-antigen complex is then bound by a secondary enzyme conjugated antibody. In the presence of the necessary substrate and chromogen the bound enzyme is detected according to coloured deposits at the antibody-antigen binding sites. There is a wide range of suitable sample types, antigen-antibody affinity, antibody types, and detection enhancement methods. Thus optimal conditions for immunohistochemical or immunocytochemical detection must be determined by the person skilled in the art for each individual case.

[0272] One approach for preparing antibodies to a polypeptide is the selection and preparation of an amino acid sequence of all or part of the polypeptide, chemically synthesising the amino acid sequence and injecting it into an appropriate animal, usually a rabbit or a mouse (Milstein and Kohler Nature 256:495-497, 1975; Gulfre and Milstein, Methods in Enzymology: Immunochemical Techniques 73:1-46, Langone and Banatis eds., Academic Press, 1981 which are incorporated by reference in its entirety). Methods for preparation of the polypeptides or epitopes thereof include, but are not limited to chemical synthesis, recombinant DNA techniques or isolation from biological samples.

[0273] In the final step of the method the diagnosis of the patient is determined, whereby under-expression (of at least one gene selected from the group consisting of RASSF2, TFAP2E, SND1, PCDHGC3, EDNRB, STOM, GLI3, RXFP3, LimK1, GPR73L1, PCDH10, DOCK10 and MRPS21, and in a preferred embodiment Septin 9) is indicative of the presence of cancer. The term under-expression shall be taken to mean expression at a detected level less than a pre-determined cut off which may be selected from the group consisting of the mean, median or an optimised threshold value. Another aspect of the invention provides a kit for use in diagnosis of cancer in a subject according to the methods of the present invention, comprising: a means for detecting polypeptides at least one gene selected from the group consisting of RASSF2, TFAP2E, SND1, PCDHGC3, EDNRB, STOM, GLI3, RXFP3, LimK1, GPR73L1, PCDH10, DOCK10 and MRPS21. Preferably said group consists of the genes RASSF2, TFAP2E, SND1 & PCDHGC3. The means for detecting the polypeptides comprise preferably antibodies, antibody derivatives, or antibody fragments. The polypeptides are most preferably detected by means of Western Blotting utilizing a labelled antibody. In another embodiment of the invention the kit further comprising means for obtaining a biological sample of the patient. Preferred is a kit, which further comprises a container suitable for containing the means for detecting the polypeptides in the biological sample of the patient, and most preferably further comprises instructions for use and interpretation of the kit results. In a preferred embodiment the kit comprises: (a) a means for detecting polypeptides at least one gene selected from the group consisting of RASSF2, TFAP2E, SND1, PCDHGC3, EDNRB, STOM, GLI3, RXFP3, LimK1, GPR73L1, PCDH10, DOCK10 and MRPS21; (b) a container suitable for containing the said means and the biological sample of the patient comprising the polypeptides wherein the means can form complexes with the polypeptides; (c) a means to detect the complexes of (b); and optionally (d) instructions for use and interpretation of the kit results.

[0274] Preferably (a) is a means for detecting polypeptides at least one gene selected from the group consisting of RASSF2, TFAP2E, SND1 & PCDHGC3.

[0275] The kit may also contain other components such as buffers or solutions suitable for blocking, washing or coating, packaged in a separate container.

[0276] Particular embodiments of the present invention provide a novel application of the analysis of methylation levels and/or patterns within said sequences that enables a precise detection, characterisation and/or treatment of colorectal cell proliferative disorders. Early detection of cancer is directly linked with disease prognosis, and the disclosed method thereby enables the physician and patient to make better and more informed treatment decisions.

### Further Improvements

[0277] The present invention provides novel uses for the genomic sequence SEQ ID NO: 1 TO SEQ ID NO: 11 AND SEQ ID NO: 132 TO SEQ ID NO: 133. Additional embodiments provide modified variants of SEQ ID NO: 1 TO SEQ ID NO: 11 AND SEQ ID NO: 132 TO SEQ ID NO: 133, as well as oligonucleotides and/or PNA-oligomers for analysis of cytosine methylation patterns within SEQ ID NO: 1 TO SEQ ID NO: 11 AND SEQ ID NO: 132 TO SEQ ID NO: 133.

[0278] An objective of the invention comprises analysis of the methylation state of one or more CpG dinucleotides within AT LEAST ONE SEQUENCE SELECTED FROM THE GROUP CONSISTING SEQ ID NO: 1 TO SEQ ID NO: 14 AND SEQ ID NO: 132 TO SEQ ID NO: 133 and sequences complementary thereto.

[0279] The disclosed invention provides treated nucleic acids, derived from genomic SEQ ID NO: 1 TO SEQ ID NO: 14 AND SEQ ID NO: 132 TO SEQ ID NO: 133, wherein the treatment is suitable to convert at least one unmethylated cytosine base of the genomic DNA sequence to uracil or another base that is detectably dissimilar to cytosine in terms of hybridization. The genomic sequences in question may comprise one, or more consecutive methylated CpG positions. Said treatment preferably comprises use of a reagent selected from the group consisting of bisulfite, hydrogen sulfite, disulfite, and combinations thereof. In a preferred embodiment of the invention, the invention provides a non-naturally occurring modified nucleic acid comprising a sequence of at least 16 contiguous nucleotide bases in length of a sequence selected from the group consisting of SEQ ID NO: 15 TO SEQ ID NO: 70 AND SEQ ID NO: 134 TO SEQ ID NO: 141. In further preferred embodiments of the invention said nucleic acid is at least 50, 100, 150, 200, 250 or 500 base pairs in length of a segment of the nucleic acid sequence disclosed in SEQ ID NO: 15 TO SEQ ID NO: 36 AND SEQ ID NO: 43 TO SEQ ID NO: 64 AND SEQ ID NO: 134 TO SEQ ID NO: 141. Particularly preferred is a nucleic acid molecule that is not identical or complementary to all or a portion of the sequences SEQ ID NO: 15 TO SEQ ID NO: 70 AND SEQ ID NO: 134 TO SEQ ID NO: 141 but not SEQ ID NO: 1 TO SEQ ID NO: 14 AND SEQ ID NO: 132 TO SEQ ID NO: 133 or other naturally occurring DNA.

[0280] It is preferred that said sequence comprises at least one CpG, TpA or CpA dinucleotide and sequences complementary thereto. The sequences of SEQ ID NO: 15 TO SEQ ID NO: 70 AND SEQ ID NO: 134 TO SEQ ID NO: 141 provide non-naturally occurring modified versions of the nucleic acid according to SEQ ID NO: 1 TO SEQ ID NO: 14 AND SEQ ID NO: 132 TO SEQ ID NO: 133, wherein the modification of each genomic sequence results in the synthesis of a nucleic acid having a sequence that is unique and distinct from said genomic sequence as follows. For each sense strand genomic DNA, e.g., SEQ ID NO: 1, four converted versions are disclosed. A first version wherein “C” is converted to “T,” but “CpG” remains “CpG” (i.e., corresponds to case where, for the genomic sequence, all “C” residues of CpG dinucleotide sequences are methylated and are thus not converted); a second version discloses the complement of the disclosed genomic DNA sequence (i.e. antisense strand), wherein “C” is converted to “T,” but “CpG” remains “CpG” (i.e., corresponds to case where, for all “C” residues of CpG dinucleotide sequences are methylated and are thus not converted). The ‘upmethylated’ converted sequences of SEQ ID NO: 1 TO SEQ ID NO: 14 AND SEQ ID NO: 132 TO SEQ ID NO: 133 correspond to SEQ ID NO: 15 TO SEQ ID NO: 42. A third chemically converted version of each genomic sequences is provided, wherein “C” is converted to “T” for all “C” residues, including those of “CpG” dinucleotide sequences (i.e., corresponds to case where, for the genomic sequences, all “C” residues of CpG dinucleotide sequences are unmethylated); a final chemically converted version of each sequence, discloses the complement of the disclosed genomic DNA sequence (i.e. antisense strand), wherein “C” is converted to “T” for all “C” residues, including those of “CpG” dinucleotide sequences (i.e., corresponds to case where, for the complement (antisense strand) of each genomic sequence, all “C” residues of CpG dinucleotide sequences are unmethylated). The ‘downmethylated’ converted sequences of SEQ ID NO: 1 TO SEQ ID NO: 14 AND SEQ ID NO: 132 TO SEQ ID NO: 133 correspond to SEQ ID NO: 43 TO SEQ ID NO: 70. See Table 1 for further details.

[0281] Significantly, heretofore, the nucleic acid sequences and molecules according SEQ ID NO: 15 TO SEQ ID NO: 36 AND SEQ ID NO: 43 TO SEQ ID NO: 64 AND SEQ ID NO: 134 TO SEQ ID NO: 141 were not implicated in or connected with the detection of cellular proliferative disorders.

[0282] In an alternative preferred embodiment, the invention further provides oligonucleotides or oligomers suitable for use in the methods of the invention for detecting the cytosine methylation state within genomic or treated (chemically modified) DNA, according to SEQ ID NO: 15 TO SEQ ID NO: 70 AND SEQ ID NO: 134 TO SEQ ID NO: 141, SEQ ID NO: 1 TO SEQ ID NO: 14 AND SEQ ID NO: 132 TO SEQ ID NO: 133. Said oligonucleotide or oligomer nucleic acids provide novel diagnostic means. Said oligonucleotide or oligomer comprising a nucleic acid sequence having a length of at least nine (9) nucleotides which is identical to, hybridizes, under moderately stringent or stringent conditions (as defined herein above), to a treated nucleic acid sequence according to SEQ ID NO: 15 TO SEQ ID NO: 70 AND SEQ ID NO: 134 TO SEQ ID NO: 141 and/or sequences complementary thereto, or to a genomic sequence according to SEQ ID NO: 1 TO SEQ ID NO: 14 AND SEQ ID NO: 132 TO SEQ ID NO: 133 and/or sequences complementary thereto.

[0283] Thus, the present invention includes nucleic acid molecules (e.g., oligonucleotides and peptide nucleic acid (PNA) molecules (PNA-oligomers)) that hybridize under moderately stringent and/or stringent hybridization conditions to all or a portion of a sequence selected from the group consisting of SEQ ID NO: 15 TO SEQ ID NO: 70 AND SEQ ID NO: 134 TO SEQ ID NO: 141, SEQ ID NO: 1 TO SEQ ID NO: 14 AND SEQ ID NO: 132 TO SEQ ID NO: 133 or to the complements thereof. Particularly preferred is a nucleic acid molecule that hybridizes under moderately stringent and/or stringent hybridization conditions to all or a portion of the sequences SEQ ID NO: 15 TO SEQ ID NO: 70 AND SEQ ID NO: 134 TO SEQ ID NO: 141 but not SEQ ID NO: 1 TO SEQ ID NO: 14 AND SEQ ID NO: 132 TO SEQ ID NO: 133 or other human genomic DNA.

[0284] The identical or hybridizing portion of the hybridizing nucleic acids is typically at least 9, 16, 20, 25, 30 or 35 nucleotides in length. However, longer molecules have inventive utility, and are thus within the scope of the present invention.

[0285] Preferably, the hybridizing portion of the inventive hybridizing nucleic acids is at least 95%, or at least 98%, or 100% identical to the sequence, or to a portion thereof of a sequence selected from the group consisting of SEQ ID NO: 1 TO SEQ ID NO: 11 AND SEQ ID NO: 132 TO SEQ ID NO: 133, SEQ ID NO: 15 TO SEQ ID NO: 36 AND SEQ ID NO: 43 TO SEQ ID NO: 64 AND SEQ ID NO: 134 TO SEQ ID NO: 141, or to the complements thereof.

[0286] Hybridizing nucleic acids of the type described herein can be used, for example, as a primer (e.g., a PCR primer), or a diagnostic and/or prognostic probe or primer. Preferably, hybridization of the oligonucleotide probe to a nucleic acid sample is performed under stringent conditions and the probe is 100% identical to the target sequence. Nucleic acid duplex or hybrid stability is expressed as the melting temperature or Tm, which is the temperature at which a probe dissociates from a target DNA. This melting temperature is used to define the required stringency conditions.

[0287] For target sequences that are related and substantially identical to the corresponding sequence of SEQ ID NO: 1 TO SEQ ID NO: 14 AND SEQ ID NO: 132 TO SEQ ID NO: 133 (such as allelic variants and SNPs), rather than identical, it is useful to first establish the lowest temperature at which only homologous hybridization occurs with a particular concentration of salt (e.g., SSC or SSPE). Then, assuming that 1% mismatching results in a 1° C. decrease in the Tm, the temperature of the final wash in the hybridization reaction is reduced accordingly (for example, if sequences having >95% identity with the probe are sought, the final wash temperature is decreased by 5° C.). In practice, the change in Tm can be between 0.5° C. and 1.5° C. per 1% mismatch.

[0288] Examples of inventive oligonucleotides of length X (in nucleotides), as indicated by polynucleotide positions with reference to, e.g., SEQ ID NO: 1, include those corresponding to sets (sense and antisense sets) of consecutively overlapping oligonucleotides of length X, where the oligonucleotides within each consecutively overlapping set (corresponding to a given X value) are defined as the finite set of Z oligonucleotides from nucleotide positions:

[0289] n to (n+(X−1));

[0290] where n=1, 2, 3, . . . (Y−(X−1));

[0291] where Y equals the length (nucleotides or base pairs) of SEQ ID NO: 1 (2519);

[0292] where X equals the common length (in nucleotides) of each oligonucleotide in the set (e.g., X=20 for a set of consecutively overlapping 20-mers); and

[0293] where the number (Z) of consecutively overlapping oligomers of length X for a given SEQ ID NO of length Y is equal to Y-(2519-1). For example Z=2519−19=2500 for either sense or antisense sets of SEQ ID NO: 1, where X=20.

[0294] Preferably, the set is limited to those oligomers that comprise at least one CpG, TpG or CpA dinucleotide.

[0295] Examples of inventive 20-mer oligonucleotides include the following set of 2,261 oligomers (and the antisense set complementary thereto), indicated by polynucleotide positions with reference to SEQ ID NO: 1:

[0296] 1-20, 2-21, 3-22, 4-23, 5-24, . . . and 2499-2519.

[0297] Preferably, the set is limited to those oligomers that comprise at least one CpG, TpG or CpA dinucleotide.

[0298] Likewise, examples of inventive 25-mer oligonucleotides include the following set of 2,256 oligomers (and the antisense set complementary thereto), indicated by polynucleotide positions with reference to SEQ ID NO: 1:

[0299] 1-25, 2-26, 3-27, 4-28, 5-29, . . . and 2494-2519.

[0300] Preferably, the set is limited to those oligomers that comprise at least one CpG, TpG or CpA dinucleotide.

[0301] The present invention encompasses, for each of SEQ ID NO: 1 TO SEQ ID NO: 11 AND SEQ ID NO: 132 TO SEQ ID NO: 133, SEQ ID NO: 15 TO SEQ ID NO: 36 AND SEQ ID NO: 43 TO SEQ ID NO: 64 AND SEQ ID NO: 134 TO SEQ ID NO: 141 (sense and antisense), multiple consecutively overlapping sets of oligonucleotides or modified oligonucleotides of length X, where, e.g., X=9, 10, 17, 20, 22, 23, 25, 27, 30 or 35 nucleotides.

[0302] The oligonucleotides or oligomers according to the present invention constitute effective tools useful to ascertain genetic and epigenetic parameters of the genomic sequences selected from the group consisting of SEQ ID NO: 1 TO SEQ ID NO: 14 AND SEQ ID NO: 132 TO SEQ ID NO: 133. Preferred sets of such oligonucleotides or modified oligonucleotides of length X are those consecutively overlapping sets of oligomers corresponding to SEQ ID NO: 1 TO SEQ ID NO: 14 AND SEQ ID NO: 132 TO SEQ ID NO: 133, SEQ ID NO: 15 TO SEQ ID NO: 70 AND SEQ ID NO: 134 TO SEQ ID NO: 141 (and to the complements thereof). Preferably, said oligomers comprise at least one CpG, TpG or CpA dinucleotide.

[0303] Particularly preferred oligonucleotides or oligomers according to the present invention are those in which the cytosine of the CpG dinucleotide (or of the corresponding converted TpG or CpA dinculeotide) sequences is within the middle third of the oligonucleotide; that is, where the oligonucleotide is, for example, 13 bases in length, the CpG, TpG or CpA dinucleotide is positioned within the fifth to ninth nucleotide from the 5′-end.

[0304] The oligonucleotides of the invention can also be modified by chemically linking the oligonucleotide to one or more moieties or conjugates to enhance the activity, stability or detection of the oligonucleotide. Such moieties or conjugates include chromophores, fluorophors, lipids such as cholesterol, cholic acid, thioether, aliphatic chains, phospholipids, polyamines, polyethylene glycol (PEG), palmityl moieties, and others as disclosed in, for example, U.S. Pat. Nos. 5,514,758, 5,565,552, 5,567,810, 5,574,142, 5,585,481, 5,587,371, 5,597,696 and 5,958,773. The probes may also exist in the form of a PNA (peptide nucleic acid) which has particularly preferred pairing properties. Thus, the oligonucleotide may include other appended groups such as peptides, and may include hybridization-triggered cleavage agents (Krol et al., Bio Techniques 6:958-976, 1988) or intercalating agents (Zon, Pharm. Res. 5:539-549, 1988). To this end, the oligonucleotide may be conjugated to another molecule, e.g., a chromophore, fluorophor, peptide, hybridization-triggered cross-linking agent, transport agent, hybridization-triggered cleavage agent, etc.

[0305] The oligonucleotide may also comprise at least one art-recognized modified sugar and/or base moiety, or may comprise a modified backbone or non-natural internucleoside linkage.

[0306] The oligonucleotides or oligomers according to particular embodiments of the present invention are typically used in ‘sets,’ which contain at least one oligomer for analysis of each of the CpG dinucleotides of a genomic sequence selected from the group consisting SEQ ID NO: 1 TO SEQ ID NO: 11 AND SEQ ID NO: 132 TO SEQ ID NO: 133 and sequences complementary thereto, or to the corresponding CpG, TpG or CpA dinucleotide within a sequence of the treated nucleic acids according to SEQ ID NO: 15 TO SEQ ID NO: 36 AND SEQ ID NO: 43 TO SEQ ID NO: 64 AND SEQ ID NO: 134 TO SEQ ID NO: 141 and sequences complementary thereto. However, it is anticipated that for economic or other factors it may be preferable to analyse a limited selection of the CpG dinucleotides within said sequences, and the content of the set of oligonucleotides is altered accordingly.

[0307] Therefore, in particular embodiments, the present invention provides a set of at least two (2) (oligonucleotides and/or PNA-oligomers) useful for detecting the cytosine methylation state in treated genomic DNA (SEQ ID NO: 15 TO SEQ ID NO: 70 AND SEQ ID NO: 134 TO SEQ ID NO: 141), or in genomic DNA (SEQ ID NO: 1 TO SEQ ID NO: 14 AND SEQ ID NO: 132 TO SEQ ID NO: 133 and sequences complementary thereto). These probes enable diagnosis, classification and/or therapy of genetic and epigenetic parameters of colorectal cell proliferative disorders. The set of oligomers may also be used for detecting single nucleotide polymorphisms (SNPs) in treated genomic DNA (SEQ ID NO: 15 TO SEQ ID NO: 70 AND SEQ ID NO: 134 TO SEQ ID NO: 141), or in genomic DNA (SEQ ID NO: 1 TO SEQ ID NO: 14 AND SEQ ID NO: 132 TO SEQ ID NO: 133 and sequences complementary thereto).

[0308] In preferred embodiments, at least one, and more preferably all members of a set of oligonucleotides is bound to a solid phase.

[0309] In further embodiments, the present invention provides a set of at least two (2) oligonucleotides that are used as ‘primer’ oligonucleotides for amplifying DNA sequences of one of SEQ ID NO: 1 TO SEQ ID NO: 14 AND SEQ ID NO: 132 TO SEQ ID NO: 133, SEQ ID NO: 15 TO SEQ ID NO: 70 AND SEQ ID NO: 134 TO SEQ ID NO: 141 and sequences complementary thereto, or segments thereof.

[0310] It is anticipated that the oligonucleotides may constitute all or part of an “array” or “DNA chip” (i.e., an arrangement of different oligonucleotides and/or PNA-oligomers bound to a solid phase). Such an array of different oligonucleotide- and/or PNA-oligomer sequences can be characterized, for example, in that it is arranged on the solid phase in the form of a rectangular or hexagonal lattice. The solid-phase surface may be composed of silicon, glass, polystyrene, aluminium, steel, iron, copper, nickel, silver, or gold. Nitrocellulose as well as plastics such as nylon, which can exist in the form of pellets or also as resin matrices, may also be used. An overview of the Prior Art in oligomer array manufacturing can be gathered from a special edition of Nature Genetics (Nature Genetics Supplement, Volume 21, January 1999, and from the literature cited therein). Fluorescently labelled probes are often used for the scanning of immobilized DNA arrays. The simple attachment of Cy3 and Cy5 dyes to the 5′-OH of the specific probe are particularly suitable for fluorescence labels. The detection of the fluorescence of the hybridised probes may be carried out, for example, via a confocal microscope. Cy3 and Cy5 dyes, besides many others, are commercially available.

[0311] It is also anticipated that the oligonucleotides, or particular sequences thereof, may constitute all or part of an “virtual array” wherein the oligonucleotides, or particular sequences thereof, are used, for example, as ‘specifiers’ as part of, or in combination with a diverse population of unique labeled probes to analyze a complex mixture of analytes. Such a method, for example is described in US 2003/0013091 (U.S. Ser. No. 09/898,743, published 16 Jan. 2003). In such methods, enough labels are generated so that each nucleic acid in the complex mixture (i.e., each analyte) can be uniquely bound by a unique label and thus detected (each label is directly counted, resulting in a digital read-out of each molecular species in the mixture).

[0312] It is particularly preferred that the oligomers according to the invention are utilised for at least one of: detection of; diagnosis of; treatment of; monitoring of; and treatment and monitoring of colorectal cell proliferative disorders. This is enabled by use of said sets for the detection of one or more of the following classes of tissues: colorectal carcinoma, colon adenoma, inflammatory colon tissue, grade 2 dysplasia colon adenomas less than 1 cm, grade 3 dysplasia colon adenomas larger than 1 cm, normal colon tissue, non-colon healthy tissue and non-colon cancer tissue.

[0313] Particularly preferred are those sets of oligomers according to the Examples.

[0314] In the most preferred embodiment of the method, the presence or absence of a cellular proliferative disorder, most preferably colorectal carcinoma is determined. This is achieved by analysis of the methylation status of at least one target sequence comprising at least one CpG position said sequence comprising, or hybridizing under stringent conditions to at least 16 contiguous nucleotides of a sequence selected from the group consisting SEQ ID NO: 1 TO SEQ ID NO: 11 AND SEQ ID NO: 132 TO SEQ ID NO: 133 (and more preferably the sub-group thereof consisting of SEQ ID NO: 1; SEQ ID NO: 2; SEQ ID NO: 7 & SEQ ID NO: 11) and complements thereof. In a further preferred embodiment this is achieved by analysis of the methylation status of a target sequence comprising at least one CpG position said sequence comprising, or hybridizing under stringent conditions to at least 16 contiguous nucleotides of a sequence selected from the group consisting SEQ ID NO: 12 TO SEQ ID NO: 14 and at least one further target sequence comprising at least one CpG position said sequence comprising, or hybridizing under stringent conditions to at least 16 contiguous nucleotides of a sequence selected from the group consisting SEQ ID NO: 1 TO SEQ ID NO: 11 AND SEQ ID NO: 132 TO SEQ ID NO: 133 (and more preferably the sub-group thereof consisting of SEQ ID NO: 1; SEQ ID NO: 2; SEQ ID NO: 7 & SEQ ID NO: 11) and complements thereof.

[0315] The present invention further provides a method for ascertaining genetic and/or epigenetic parameters of the genomic sequence according to SEQ ID NO: 1 TO SEQ ID NO: 11 AND SEQ ID NO: 132 TO SEQ ID NO: 133 within a subject by analysing cytosine methylation and single nucleotide polymorphisms. Said method comprising contacting a nucleic acid comprising SEQ ID NO: 1 TO SEQ ID NO: 11 AND SEQ ID NO: 132 TO SEQ ID NO: 133 (and more preferably the sub-group thereof consisting of SEQ ID NO: 1; SEQ ID NO: 2; SEQ ID NO: 7 & SEQ ID NO: 11) in a biological sample obtained from said subject with at least one reagent or a series of reagents, wherein said reagent or series of reagents, distinguishes between methylated and non-methylated CpG dinucleotides within the target nucleic acid.

[0316] In a preferred embodiment, said method comprises the following steps: In the first step, a sample of the tissue to be analysed is obtained. The source may be any suitable source, such as cell lines, histological slides, biopsies, paraffin-embedded tissue, body fluids, stool, colonic effluent, urine, blood plasma, blood serum, whole blood, isolated blood cells, cells isolated from the blood and all possible combinations thereof. It is preferred that said sources of DNA are stool or body fluids selected from the group consisting colonic effluent, urine, blood plasma, blood serum, whole blood, isolated blood cells, cells isolated from the blood.

[0317] The genomic DNA is then isolated from the sample. Genomic DNA may be isolated by any means standard in the art, including the use of commercially available kits. Briefly, wherein the DNA of interest is encapsulated in by a cellular membrane the biological sample must be disrupted and lysed by enzymatic, chemical or mechanical means. The DNA solution may then be cleared of proteins and other contaminants e.g. by digestion with proteinase K. The genomic DNA is then recovered from the solution. This may be carried out by means of a variety of methods including salting out, organic extraction or binding of the DNA to a solid phase support. The choice of method will be affected by several factors including time, expense and required quantity of DNA.

[0318] Wherein the sample DNA is not enclosed in a membrane (e.g. circulating DNA from a blood sample) methods standard in the art for the isolation and/or purification of DNA may be employed. Such methods include the use of a protein degenerating reagent e.g. chaotropic salt e.g. guanidine hydrochloride or urea; or a detergent e.g. sodium dodecyl sulphate (SDS), cyanogen bromide. Alternative methods include but are not limited to ethanol precipitation or propanol precipitation, vacuum concentration amongst others by means of a centrifuge. The person skilled in the art may also make use of devices such as filter devices e.g.ultrafiltration, silica surfaces or membranes, magnetic particles, polystyrol particles, polystyrol surfaces, positively charged surfaces, and positively charged membranse, charged membranes, charged surfaces, charged switch membranes, charged switched surfaces.

[0319] Once the nucleic acids have been extracted, the genomic double stranded DNA is used in the analysis.

[0320] In the second step of the method, the genomic DNA sample is treated in such a manner that cytosine bases which are unmethylated at the 5′-position are converted to uracil, thymine, or another base which is dissimilar to cytosine in terms of hybridisation behaviour. This will be understood as ‘pre-treatment’ or ‘treatment’ herein.

[0321] This is preferably achieved by means of treatment with a bisulfite reagent. The term “bisulfite reagent” refers to a reagent comprising bisulfite, disulfite, hydrogen sulfite or combinations thereof, useful as disclosed herein to distinguish between methylated and unmethylated CpG dinucleotide sequences. Methods of said treatment are known in the art (e.g. PCT/EP2004/011715, which is incorporated by reference in its entirety). It is preferred that the bisulfite treatment is conducted in the presence of denaturing solvents such as but not limited to n-alkylenglycol, particularly diethylene glycol dimethyl ether (DME), or in the presence of dioxane or dioxane derivatives. In a preferred embodiment the denaturing solvents are used in concentrations between 1% and 35% (v/v). It is also preferred that the bisulfite reaction is carried out in the presence of scavengers such as but not limited to chromane derivatives, e.g., 6-hydroxy-2, 5,7,8,-tetramethylchromane 2-carboxylic acid or trihydroxybenzoe acid and derivates thereof, e.g. Gallic acid (see: PCT/EP2004/011715 which is incorporated by reference in its entirety). The bisulfite conversion is preferably carried out at a reaction temperature between 30° C. and 70° C., whereby the temperature is increased to over 85° C. for short periods of times during the reaction (see: PCT/EP2004/011715 which is incorporated by reference in its entirety). The bisulfite treated DNA is preferably purified priori to the quantification. This may be conducted by any means known in the art, such as but not limited to ultrafiltration, preferably carried out by means of Microcon̂™ columns (manufactured by Milliporê™). The purification is carried out according to a modified manufacturer's protocol (see: PCT/EP2004/011715 which is incorporated by reference in its entirety).

[0322] In the third step of the method, fragments of the treated DNA are amplified, using sets of primer oligonucleotides according to the present invention, and an amplification enzyme. The amplification of several DNA segments can be carried out simultaneously in one and the same reaction vessel. Typically, the amplification is carried out using a polymerase chain reaction (PCR). Preferably said amplificates are 100 to 2,000 base pairs in length. The set of primer oligonucleotides includes at least two oligonucleotides whose sequences are each reverse complementary, identical, or hybridise under stringent or highly stringent conditions to an at least 16-base-pair long segment of the base sequences of one of SEQ ID NO: 15 TO SEQ ID NO: 36 AND SEQ ID NO: 43 TO SEQ ID NO: 64 AND SEQ ID NO: 134 TO SEQ ID NO: 141 (and more preferably the sub-group thereof consisting of SEQ ID NOS: 15, 16, 43, 44, 17, 18, 45, 46, 27, 28, 55, 56, 35 36 63 & 64) and sequences complementary thereto. It is preferred that the set of primer oligonucleotides further comprises at least two oligonucleotides whose sequences are each reverse complementary, identical, or hybridise under stringent or highly stringent conditions to an at least 16-base-pair long segment of the base sequences of one of SEQ ID NO: 37 TO SEQ ID NO: 42 AND SEQ ID NO: 65 TO SEQ ID NO: 70 and sequences complementary thereto.

[0323] In an alternate embodiment of the method, the methylation status of pre-selected CpG positions within at least one nucleic acid sequences selected from the group consisting SEQ ID NO: 1 TO SEQ ID NO: 11 AND SEQ ID NO: 132 TO SEQ ID NO: 133 (and more preferably the sub-group thereof consisting of SEQ ID NO: 1; SEQ ID NO: 2; SEQ ID NO: 7 & SEQ ID NO: 11), AND PREFERABLY ADDITIONALLY SEQ ID NO: 12 TO SEQ ID NO: 14 may be detected by use of methylation-specific primer oligonucleotides. This technique (MSP) has been described in U.S. Pat. No. 6,265,171 to Herman. The use of methylation status specific primers for the amplification of bisulfite treated DNA allows the differentiation between methylated and unmethylated nucleic acids. MSP primers pairs contain at least one primer which hybridises to a bisulfite treated CpG dinucleotide. Therefore, the sequence of said primers comprises at least one CpG dinucleotide. MSP primers specific for non-methylated DNA contain a “T’ at the position of the C position in the CpG. Preferably, therefore, the base sequence of said primers is required to comprise a sequence having a length of at least 9 nucleotides which hybridises to a treated nucleic acid sequence according to one of SEQ ID NO: 15 TO SEQ ID NO: 36 AND SEQ ID NO: 43 TO SEQ ID NO: 64 AND SEQ ID NO: 134 TO SEQ ID NO: 141 (and more preferably the sub-group thereof consisting of SEQ ID NOS: 15, 16, 43, 44, 17, 18, 45, 46, 27, 28, 55, 56, 35 36 63 & 64) and sequences complementary thereto, wherein the base sequence of said oligomers comprises at least one CpG dinucleotide. A further preferred embodiment of the method comprises the use of blocker oligonucleotides (the HeavyMethyl™ assay). The use of such blocker oligonucleotides has been described by Yu et al., BioTechniques 23:714-720, 1997. Blocking probe oligonucleotides are hybridised to the bisulfite treated nucleic acid concurrently with the PCR primers. PCR amplification of the nucleic acid is terminated at the 5′ position of the blocking probe, such that amplification of a nucleic acid is suppressed where the complementary sequence to the blocking probe is present. The probes may be designed to hybridize to the bisulfite treated nucleic acid in a methylation status specific manner. For example, for detection of methylated nucleic acids within a population of unmethylated nucleic acids, suppression of the amplification of nucleic acids which are unmethylated at the position in question would be carried out by the use of blocking probes comprising a ‘CpA’ or ‘TpA’ at the position in question, as opposed to a ‘CpG’ if the suppression of amplification of methylated nucleic acids is desired.

[0324] For PCR methods using blocker oligonucleotides, efficient disruption of polymerase-mediated amplification requires that blocker oligonucleotides not be elongated by the polymerase. Preferably, this is achieved through the use of blockers that are 3′-deoxyoligonucleotides, or oligonucleotides derivitized at the 3′ position with other than a “free” hydroxyl group. For example, 3′-O-acetyl oligonucleotides are representative of a preferred class of blocker molecule.

[0325] Additionally, polymerase-mediated decomposition of the blocker oligonucleotides should be precluded. Preferably, such preclusion comprises either use of a polymerase lacking 5′-3′ exonuclease activity, or use of modified blocker oligonucleotides having, for example, thioate bridges at the 5′-terminii thereof that render the blocker molecule nuclease-resistant. Particular applications may not require such 5′ modifications of the blocker. For example, if the blocker- and primer-binding sites overlap, thereby precluding binding of the primer (e.g., with excess blocker), degradation of the blocker oligonucleotide will be substantially precluded. This is because the polymerase will not extend the primer toward, and through (in the 5′-3′ direction) the blocker—a process that normally results in degradation of the hybridized blocker oligonucleotide.

[0326] A particularly preferred blocker/PCR embodiment, for purposes of the present invention and as implemented herein, comprises the use of peptide nucleic acid (PNA) oligomers as blocking oligonucleotides. Such PNA blocker oligomers are ideally suited, because they are neither decomposed nor extended by the polymerase.

[0327] Preferably, therefore, the base sequence of said blocking oligonucleotides is required to comprise a sequence having a length of at least 9 nucleotides which hybridises to a treated nucleic acid sequence according to one of SEQ ID NO: 15 TO SEQ ID NO: 36 AND SEQ ID NO: 43 TO SEQ ID NO: 64 AND SEQ ID NO: 134 TO SEQ ID NO: 141 (and more preferably the sub-group thereof consisting of SEQ ID NOS: 15, 16, 43, 44, 17, 18, 45, 46, 27, 28, 55, 56, 35 36 63 & 64) and sequences complementary thereto, wherein the base sequence of said oligonucleotides comprises at least one CpG, TpG or CpA dinucleotide. Also preferred is a blocking oligonucleotides having a length of at least 9 nucleotides which hybridises to a treated nucleic acid sequence according to one of SEQ ID NO: 37 TO SEQ ID NO: 42 AND SEQ ID NO: 65 TO SEQ ID NO: 70 and sequences complementary thereto, wherein the base sequence of said oligonucleotides comprises at least one CpG, TpG or CpA dinucleotide

[0328] The fragments obtained by means of the amplification can carry a directly or indirectly detectable label. Preferred are labels in the form of fluorescence labels, radionuclides, or detachable molecule fragments having a typical mass which can be detected in a mass spectrometer. Where said labels are mass labels, it is preferred that the labelled amplificates have a single positive or negative net charge, allowing for better delectability in the mass spectrometer. The detection may be carried out and visualized by means of, e.g., matrix assisted laser desorption/ionization mass spectrometry (MALDI) or using electron spray mass spectrometry (ESI).

[0329] Matrix Assisted Laser Desorption/lonization Mass Spectrometry (MALDI-TOF) is a very efficient development for the analysis of biomolecules (Karas & Hillenkamp, Anal Chem., 60:2299-301, 1988). An analyte is embedded in a light-absorbing matrix. The matrix is evaporated by a short laser pulse thus transporting the analyte molecule into the vapor phase in an unfragmented manner. The analyte is ionized by collisions with matrix molecules. An applied voltage accelerates the ions into a field-free flight tube. Due to their different masses, the ions are accelerated at different rates. Smaller ions reach the detector sooner than bigger ones. MALDI-TOF spectrometry is well suited to the analysis of peptides and proteins. The analysis of nucleic acids is somewhat more difficult (Gut & Beck, Current Innovations and Future Trends, 1:147-57, 1995). The sensitivity with respect to nucleic acid analysis is approximately 100-times less than for peptides, and decreases disproportionally with increasing fragment size. Moreover, for nucleic acids having a multiply negatively charged backbone, the ionization process via the matrix is considerably less efficient. In MALDI-TOF spectrometry, the selection of the matrix plays an eminently important role. For desorption of peptides, several very efficient matrixes have been found which produce a very fine crystallisation. There are now several responsive matrixes for DNA, however, the difference in sensitivity between peptides and nucleic acids has not been reduced. This difference in sensitivity can be reduced, however, by chemically modifying the DNA in such a manner that it becomes more similar to a peptide. For example, phosphorothioate nucleic acids, in which the usual phosphates of the backbone are substituted with thiophosphates, can be converted into a charge-neutral DNA using simple alkylation chemistry (Gut & Beck, Nucleic Acids Res. 23: 1367-73, 1995). The coupling of a charge tag to this modified DNA results in an increase in MALDI-TOF sensitivity to the same level as that found for peptides. A further advantage of charge tagging is the increased stability of the analysis against impurities, which makes the detection of unmodified substrates considerably more difficult.

[0330] In the fourth step of the method, the amplificates obtained during the third step of the method are analysed in order to ascertain the methylation status of the CpG dinucleotides prior to the treatment.

[0331] In embodiments where the amplificates were obtained by means of MSP amplification, the presence or absence of an amplificate is in itself indicative of the methylation state of the CpG positions covered by the primer, according to the base sequences of said primer.

[0332] Amplificates obtained by means of both standard and methylation specific PCR may be further analysed by means of based-based methods such as, but not limited to, array technology and probe based technologies as well as by means of techniques such as sequencing and template directed extension.

[0333] In one embodiment of the method, the amplificates synthesised in step three are subsequently hybridized to an array or a set of oligonucleotides and/or PNA probes. In this context, the hybridization takes place in the following manner: the set of probes used during the hybridization is preferably composed of at least 2 oligonucleotides or PNA-oligomers; in the process, the amplificates serve as probes which hybridize to oligonucleotides previously bonded to a solid phase; the non-hybridized fragments are subsequently removed; said oligonucleotides contain at least one base sequence having a length of at least 9 nucleotides which is reverse complementary or identical to a segment of the base sequences specified in the present Sequence Listing; and the segment comprises at least one CpG, TpG or CpA dinucleotide. The hybridizing portion of the hybridizing nucleic acids is typically at least 9, 15, 20, 25, 30 or 35 nucleotides in length. However, longer molecules have inventive utility, and are thus within the scope of the present invention.

[0334] In a preferred embodiment, said dinucleotide is present in the central third of the oligomer. For example, wherein the oligomer comprises one CpG dinucleotide, said dinucleotide is preferably the fifth to ninth nucleotide from the 5′-end of a 13-mer. One oligonucleotide exists for the analysis of each CpG dinucleotide within a sequence selected from the group consisting SEQ ID NO: 1 TO SEQ ID NO: 11 AND SEQ ID NO: 132 TO SEQ ID NO: 133, and the equivalent positions within SEQ ID NO: 15 TO SEQ ID NO: 36 AND SEQ ID NO: 43 TO SEQ ID NO: 64 AND SEQ ID NO: 134 TO SEQ ID NO: 141. Said oligonucleotides may also be present in the form of peptide nucleic acids. The non-hybridised amplificates are then removed. The hybridised amplificates are then detected. In this context, it is preferred that labels attached to the amplificates are identifiable at each position of the solid phase at which an oligonucleotide sequence is located.

[0335] In yet a further embodiment of the method, the genomic methylation status of the CpG positions may be ascertained by means of oligonucleotide probes (as detailed above) that are hybridised to the bisulfite treated DNA concurrently with the PCR amplification primers (wherein said primers may either be methylation specific or standard).

[0336] A particularly preferred embodiment of this method is the use of fluorescence-based Real Time Quantitative PCR (Heid et al., Genome Res. 6:986-994, 1996; also see U.S. Pat. No. 6,331,393) employing a dual-labelled fluorescent oligonucleotide probe (TaqMan™ PCR, using an ABI Prism 7700 Sequence Detection System, Perkin Elmer Applied Biosystems, Foster City, Calif.). The TaqMan™ PCR reaction employs the use of a non-extendible interrogating oligonucleotide, called a TaqMan™ probe, which, in preferred embodiments, is designed to hybridise to a CpG-rich sequence located between the forward and reverse amplification primers. The TaqMan™ probe further comprises a fluorescent “reporter moiety” and a “quencher moiety” covalently bound to linker moieties (e.g., phosphoramidites) attached to the nucleotides of the TaqMan™ oligonucleotide. For analysis of methylation within nucleic acids subsequent to bisulfite treatment, it is required that the probe be methylation specific, as described in U.S. Pat. No. 6,331,393, (hereby incorporated by reference in its entirety) also known as the MethyLight™™ assay. Variations on the TaqMan™ detection methodology that are also suitable for use with the described invention include the use of dual-probe technology (Lightcycler™) or fluorescent amplification primers (Sunrise™ technology). Both these techniques may be adapted in a manner suitable for use with bisulfite treated DNA, and moreover for methylation analysis within CpG dinucleotides.

[0337] In a further preferred embodiment of the method, the fourth step of the method comprises the use of template-directed oligonucleotide extension, such as MS-SNuPE as described by Gonzalgo & Jones, Nucleic Acids Res. 25:2529-2531, 1997.

[0338] In yet a further embodiment of the method, the fourth step of the method comprises sequencing and subsequent sequence analysis of the amplificate generated in the third step of the method (Sanger F., et al., Proc Natl Acad Sci USA 74:5463-5467, 1977).

### BEST MODE

[0339] In the most preferred embodiment of the method the genomic nucleic acids are isolated and treated according to the first three steps of the method outlined above, namely:
[0340] a) obtaining, from a subject, a biological sample having subject genomic DNA;
[0341] b) extracting or otherwise isolating the genomic DNA;
[0342] c) treating the genomic DNA of b), or a fragment thereof, with one or more reagents to convert cytosine bases that are unmethylated in the 5-position thereof to uracil or to another base that is detectably dissimilar to cytosine in terms of hybridization properties; and wherein
[0343] d) amplifying subsequent to treatment in c) is carried out in a methylation specific manner, namely by use of methylation specific primers or blocking oligonucleotides, and further wherein
[0344] e) detecting of the amplificates is carried out by means of a real-time detection probe, as described above.

[0345] Preferably, where the subsequent amplification of d) is carried out by means of methylation specific primers, as described above, said methylation specific primers comprise a sequence having a length of at least 9 nucleotides which hybridises to a treated nucleic acid sequence according to one of SEQ ID NO: 15 TO SEQ ID NO: 36 AND SEQ ID NO: 43 TO SEQ ID NO: 64 AND SEQ ID NO: 134 TO SEQ ID NO: 141 (and more preferably one of the sub-group thereof consisting of SEQ ID NOS: 15, 16, 43, 44, 17, 18, 45, 46, 27, 28, 55, 56, 35 36 63 & 64) and sequences complementary thereto, wherein the base sequence of said oligomers comprise at least one CpG dinucleotide. It is particularly preferred that the subsequent amplification of d) is additionally carried out by means of methylation specific primers each comprising a sequence having a length of at least 9 nucleotides which hybridises to a treated nucleic acid sequence according to one of SEQ ID NO: 37 TO SEQ ID NO: 42 AND SEQ ID NO: 65 TO SEQ ID NO: 70 (and more preferably one of the sub-group thereof consisting of SEQ ID NOS: 15, 16, 43, 44, 17, 18, 45, 46, 27, 28, 55, 56, 35 36 63 & 64) and sequences complementary thereto, wherein the base sequence of said oligomers comprise at least one CpG dinucleotide.

[0346] Step e) of the method, namely the detection of the specific amplificates indicative of the methylation status of one or more CpG positions of at least one sequence of the group comprising SEQ ID NO: 1 TO SEQ ID NO: 11 AND SEQ ID NO: 132 TO SEQ ID NO: 133 (and more preferably the sub-group thereof consisting of SEQ ID NO: 1; SEQ ID NO: 2; SEQ ID NO: 7 & SEQ ID NO: 11) ANDPREFERABLY ALSO SEQ ID NO: 12 TO SEQ ID NO: 14 is carried out by means of real-time detection methods as described above.

[0347] Additional embodiments of the invention provide a method for the analysis of the methylation status of genomic DNA according to the invention (SEQ ID NO: 1 TO SEQ ID NO: 11 AND SEQ ID NO: 132 TO SEQ ID NO: 133 and furthermore SEQ ID NO: 12 TO SEQ ID NO: 14 and complements thereof) without the need for bisulfite conversion. Methods are known in the art wherein a methylation sensitive restriction enzyme reagent, or a series of restriction enzyme reagents comprising methylation sensitive restriction enzyme reagents that distinguishes between methylated and non-methylated CpG dinucleotides within a target region are utilized in determining methylation, for example but not limited to DMH.

[0348] In the first step of such additional embodiments, the genomic DNA sample is isolated from tissue or cellular sources. Genomic DNA may be isolated by any means standard in the art, including the use of commercially available kits. Briefly, wherein the DNA of interest is encapsulated in by a cellular membrane the biological sample must be disrupted and lysed by enzymatic, chemical or mechanical means. The DNA solution may then be cleared of proteins and other contaminants, e.g., by digestion with proteinase K. The genomic DNA is then recovered from the solution. This may be carried out by means of a variety of methods including salting out, organic extraction or binding of the DNA to a solid phase support. The choice of method will be affected by several factors including time, expense and required quantity of DNA. All clinical sample types comprising neoplastic or potentially neoplastic matter are suitable for us e in the present method, preferred are cell lines, histological slides, biopsies, paraffin-embedded tissue, body fluids, stool, colonic effluent, urine, blood plasma, blood serum, whole blood, isolated blood cells, cells isolated from the blood and combinations thereof. Body fluids are the preferred source of the DNA; particularly preferred are blood plasma, blood serum, whole blood, isolated blood cells and cells isolated from the blood.

[0349] Once the nucleic acids have been extracted, the genomic double-stranded DNA is used in the analysis.

[0350] In a preferred embodiment, the DNA may be cleaved prior to treatment with methylation sensitive restriction enzymes. Such methods are known in the art and may include both physical and enzymatic means. Particularly preferred is the use of one or a plurality of restriction enzymes which are not methylation sensitive, and whose recognition sites are AT rich and do not comprise CG dinucleotides. The use of such enzymes enables the conservation of CpG islands and CpG rich regions in the fragmented DNA. The non-methylation-specific restriction enzymes are preferably selected from the group consisting of MseI, BfaI, Csp6I, Tru1I, Tvu1I, Tru9I, Tvu9I, MaeI and XspI. Particularly preferred is the use of two or three such enzymes. Particularly preferred is the use of a combination of MseI, BfaI and Csp6I.

[0351] The fragmented DNA may then be ligated to adaptor oligonucleotides in order to facilitate subsequent enzymatic amplification. The ligation of oligonucleotides to blunt and sticky ended DNA fragments is known in the art, and is carried out by means of dephosphorylation of the ends (e.g. using calf or shrimp alkaline phosphatase) and subsequent ligation using ligase enzymes (e.g. T4 DNA ligase) in the presence of dATPs. The adaptor oligonucleotides are typically at least 18 base pairs in length.

[0352] In the third step, the DNA (or fragments thereof) is then digested with one or more methylation sensitive restriction enzymes. The digestion is carried out such that hydrolysis of the DNA at the restriction site is informative of the methylation status of a specific CpG dinucleotide of at least one gene selected from the group consisting of RASSF2, TFAP2E, SND1, PCDHGC3, EDNRB, STOM, GLI3, RXFP3, LimK1, GPR73L1, PCDH10, DOCK10 and MRPS21. Preferably said group consists of the genes RASSF2, TFAP2E, SND1 & PCDHGC3.

[0353] It is particularly preferred that the digestion is carried out such that hydrolysis of the DNA at the restriction site is informative of the methylation status of at least one CpG dinucleotide of the gene SEPTIN 9 and furthermore of at least one CpG dinucleotide of at least one gene selected from the group consisting of RASSF2, TFAP2E, SND1, PCDHGC3, EDNRB, STOM, GLI3, RXFP3, LimK1, GPR73L1, PCDH10, DOCK10 and MRPS21. Preferably said group consists of the genes RASSF2, TFAP2E, SND1 & PCDHGC3.

[0354] Particularly preferred are the following combinations of genes:
[0355] Septin 9+RASSF2+TFAP2E+PCDHGC3+SND1
[0356] Septin 9+RASSF2+TFAP2E+PCDHGC3
[0357] Septin 9+RASSF2+TFAP2E
[0358] Septin 9+TFAP2E+PCDHGC3
[0359] Septin 9+RASSF2
[0360] Septin 9+TFAP2E
[0361] Septin 9+PCDHGC3

[0362] Preferably, the methylation-specific restriction enzyme is selected from the group consisting of Bsi E1, Hga I HinPI, Hpy99I, Ava I, Bce AI, Bsa HI, BisI, BstUI, BshI1236I, AccII, BstFNI, McrBC, Glal, MvnI, HpaII (HapII), HhaI, AciI, SmaI, HinP1I, HpyCH4IV, EagI and mixtures of two or more of the above enzymes. Preferred is a mixture containing the restriction enzymes BstUI, HpaII, HpyCH4IV and HinP1I.

[0363] In the fourth step, which is optional but a preferred embodiment, the restriction fragments are amplified. This is preferably carried out using a polymerase chain reaction, and said amplificates may carry suitable detectable labels as discussed above, namely fluorophore labels, radionuclides and mass labels. Particularly preferred is amplification by means of an amplification enzyme and at least two primers comprising, in each case a contiguous sequence at least 16 nucleotides in length that is complementary to, or hybridizes under moderately stringent or stringent conditions to a sequence selected from the group consisting SEQ ID NO: 1 TO SEQ ID NO: 11 AND SEQ ID NO: 132 TO SEQ ID NO: 133 (and more preferably the sub-group thereof consisting of SEQ ID NO: 1; SEQ ID NO: 2; SEQ ID NO: 7 & SEQ ID NO: 11), and complements thereof. Further preferred is amplification by means of an amplification enzyme, at least two primers comprising, in each case a contiguous sequence at least 16 nucleotides in length that is complementary to, or hybridizes under moderately stringent or stringent conditions to a sequence selected from the group consisting SEQ ID NO: 1 TO SEQ ID NO: 11 AND SEQ ID NO: 132 TO SEQ ID NO: 133 (and more preferably the sub-group thereof consisting of SEQ ID NO: 1; SEQ ID NO: 2; SEQ ID NO: 7 & SEQ ID NO: 11), and complements thereof and at least two primers comprising, in each case a contiguous sequence at least 16 nucleotides in length that is complementary to, or hybridizes under moderately stringent or stringent conditions to a sequence selected from the group consisting SEQ ID NO: 12 TO SEQ ID NO: 14, and complements thereof. Preferably said contiguous sequence is at least 16, 20 or 25 nucleotides in length. In an alternative embodiment said primers may be complementary to any adaptors linked to the fragments.

[0364] In the fifth step the amplificates are detected. The detection may be by any means standard in the art, for example, but not limited to, gel electrophoresis analysis, hybridisation analysis, incorporation of detectable tags within the PCR products, DNA array analysis, MALDI or ESI analysis. Preferably said detection is carried out by hybridisation to at least one nucleic acid or peptide nucleic acid comprising in each case a contiguous sequence at least 16 nucleotides in length that is complementary to, or hybridizes under moderately stringent or stringent conditions to a sequence selected from the group consisting SEQ ID NO: 1 TO SEQ ID NO: 11 AND SEQ ID NO: 132 TO SEQ ID NO: 133 (and more preferably the sub-group thereof consisting of SEQ ID NO: 1; SEQ ID NO: 2; SEQ ID NO: 7 & SEQ ID NO: 11), and complements thereof. It is further preferred that said detection is carried out by hybridisation to at least one nucleic acid or peptide nucleic acid comprising in each case a contiguous sequence at least 16 nucleotides in length that is complementary to, or hybridizes under moderately stringent or stringent conditions to a sequence selected from the group consisting SEQ ID NO: 1 TO SEQ ID NO: 11 AND SEQ ID NO: 132 TO SEQ ID NO: 133 (and more preferably the sub-group thereof consisting of SEQ ID NO: 1; SEQ ID NO: 2; SEQ ID NO: 7 & SEQ ID NO: 11), and complements thereof and additionally at least one nucleic acid or peptide nucleic acid comprising in each case a contiguous sequence at least 16 nucleotides in length that is complementary to, or hybridizes under moderately stringent or stringent conditions to a sequence selected from the group consisting SEQ ID NO: 12 TO SEQ ID NO: 14 Preferably said contiguous sequence is at least 16, 20 or 25 nucleotides in length.

[0365] Subsequent to the determination of the methylation state or level of the genomic nucleic acids the presence or absence of cellular proliferative disorder (most preferably colorectal carcinoma) is deduced based upon the methylation state or level of at least one CpG dinucleotide sequence of at least one sequence selected from the group consisting SEQ ID NO: 1 TO SEQ ID NO: 11 AND SEQ ID NO: 132 TO SEQ ID NO: 133 (and more preferably the sub-group thereof consisting of SEQ ID NO: 1; SEQ ID NO: 2; SEQ ID NO: 7 & SEQ ID NO: 11), or an average, or a value reflecting an average methylation state of a plurality of CpG dinucleotide sequences of at least one sequence selected from the group consisting SEQ ID NO: 1 TO SEQ ID NO: 11 AND SEQ ID NO: 132 TO SEQ ID NO: 133 (and more preferably the sub-group thereof consisting of SEQ ID NO: 1; SEQ ID NO: 2; SEQ ID NO: 7 & SEQ ID NO: 11) wherein methylation is associated with the presence of colorectal carcinoma. It is further preferred that the determination of the methylation state or level of the genomic nucleic acids the presence or absence of cellular proliferative disorder (most preferably colorectal carcinoma) is deduced based upon the methylation state or level of at least one CpG dinucleotide sequence of the gen Septin 9 and furthermore of at least one CpG dinucleotide sequence of at least one sequence selected from the group consisting SEQ ID NO: 12 TO SEQ ID NO: 14, or an average, or a value reflecting an average methylation state of a plurality of CpG dinucleotide sequences of at least one sequence selected from the group consisting SEQ ID NO: 1 TO SEQ ID NO: 11 AND SEQ ID NO: 132 TO SEQ ID NO: 133 (and more preferably the sub-group thereof consisting of SEQ ID NO: 1; SEQ ID NO: 2; SEQ ID NO: 7 & SEQ ID NO: 11) wherein methylation of any of the analysed CpG positions is associated with the presence of colorectal carcinoma.

[0366] Wherein said methylation is determined by quantitative means the cut-off point for determining said the presence of methylation is preferably zero (i.e. wherein a sample displays any degree of methylation it is determined as having a methylated status at the analysed CpG position). Nonetheless, it is foreseen that the person skilled in the art may wish to adjust said cut-off value in order to provide an assay of a particularly preferred sensitivity or specificity. Accordingly said cut-off value may be increased (thus increasing the specificity), said cut off value may be within a range selected from the group consisting of 0%-5%, 5%-10%, 10%-15%, 15%-20%, 20%-30% and 30%-50%. Particularly preferred are the cut-offs 10%, 15%, 25%, and 30%.

[0367] In an alternative embodiment of the method wherein a panel of genes comprising the Septin 9 or its truncated transcript Q9HC74 and at least one gene selected from the group consisting RASSF2, TFAP2E, SND1, PCDHGC3, EDNRB, STOM, GLI3, RXFP3, LimK1, GPR73L1, PCDH10, DOCK10 and MRPS21 (preferably said group consists of the genes RASSF2, TFAP2E, SND1 & PCDHGC3) subsequent to the determination of the methylation state of the genomic nucleic acids the presence or absence of cellular proliferative disorders, in particular colorectal cell proliferative disorder is deduced based upon the methylation state of at least one CpG dinucleotide sequence of SEQ ID NO: 12 to SEQ ID NO: 14 and at least one CpG dinucleotide sequence of SEQ ID NO: 1 TO SEQ ID NO: 11 AND SEQ ID NO: 132 TO SEQ ID NO: 133, or an average, or a value reflecting an average methylation state of a plurality of CpG dinucleotide sequences thereof wherein hypermethylation is associated with cancers, in particular colorectal cancer.

### Diagnostic and Prognostic Assays for Cellular Proliferative Disorders

[0368] The present invention enables diagnosis of events which are disadvantageous to patients or individuals in which important genetic and/or epigenetic parameters within at least one gene selected from the group consisting of RASSF2, TFAP2E, SND1, PCDHGC3, EDNRB, STOM, GLI3, RXFP3, LimK1, GPR73L1, PCDH10, DOCK10 and MRPS21 may be used as markers. Said parameters obtained by means of the present invention may be compared to another set of genetic and/or epigenetic parameters, the differences serving as the basis for a diagnosis and/or prognosis of events which are disadvantageous to patients or individuals.

[0369] More specifically the present invention enables the screening of at-risk populations for the early detection of cancers, most preferably colorectal carcinomas. Neoplastic cellular proliferative disorders, most particularly carcinomas, present decreased methylation (i.e. decreased expression) within at least one gene selected from the group consisting of RASSF2, TFAP2E, SND1, PCDHGC3, EDNRB, STOM, GLI3, RXFP3, LimK1, GPR73L1, PCDH10, DOCK10 and MRPS21, as opposed to benign disorders and normal tissues which do not.

[0370] Specifically, the present invention provides for diagnostic cancer assays based on measurement of differential expression (preferably methylation) of one or more CpG dinucleotide sequences of at least one sequence selected from the group consisting SEQ ID NO: 1 TO SEQ ID NO: 11 AND SEQ ID NO: 132 TO SEQ ID NO: 133 that comprise such a CpG dinucleotide sequence. Typically, such assays involve obtaining a sample from a subject, performing an assay to measure the expression of at least one gene selected from the group consisting of RASSF2, TFAP2E, SND1, PCDHGC3, EDNRB, STOM, GLI3, RXFP3, LimK1, GPR73L1, PCDH10, DOCK10 and MRPS21, preferably by determining the methylation status of at least one sequence selected from the group consisting SEQ ID NO: 1 TO SEQ ID NO: 11 AND SEQ ID NO: 132 TO SEQ ID NO: 133, derived from the sample, relative to a control sample, or a known standard and making a diagnosis based thereon. Preferably said group consists of the genes RASSF2, TFAP2E, SND1 & PCDHGC3.

[0371] Particularly preferred are the following combinations of genes:
[0372] Septin 9+RASSF2+TFAP2E+PCDHGC3+SND1
[0373] Septin 9+RASSF2+TFAP2E+PCDHGC3
[0374] Septin 9+RASSF2+TFAP2E
[0375] Septin 9+TFAP2E+PCDHGC3
[0376] Septin 9+RASSF2
[0377] Septin 9+TFAP2E
[0378] Septin 9+PCDHGC3

[0379] In particular preferred embodiments, inventive oligomers are used to assess the CpG dinucleotide methylation status, such as those based on SEQ ID NO: 1 TO SEQ ID NO: 11 AND SEQ ID NO: 132 TO SEQ ID NO: 133, SEQ ID NO: 15 TO SEQ ID NO: 36 AND SEQ ID NO: 43 TO SEQ ID NO: 64 AND SEQ ID NO: 134 TO SEQ ID NO: 141, or arrays thereof, as well as in kits based thereon and useful for the diagnosis of cellular proliferative disorders, most preferably colorectal carcinoma.

[0380] Kits

[0381] Moreover, an additional aspect of the present invention is a kit comprising: a means for determining methylation of at least one gene selected from the group consisting of RASSF2, TFAP2E, SND1, PCDHGC3, EDNRB, STOM, GLI3, RXFP3, LimK1, GPR73L1, PCDH10, DOCK10 and MRPS21. Preferably said group consists of the genes RASSF2, TFAP2E, SND1 & PCDHGC3.

[0382] The means for determining methylation comprise preferably a bisulfite-containing reagent; one or a plurality of oligonucleotides consisting whose sequences in each case are identical, are complementary, or hybridise under stringent or highly stringent conditions to an at least 9 or more preferably 18 base long segment of a sequence selected from SEQ ID NO: 15 TO SEQ ID NO: 36 AND SEQ ID NO: 43 TO SEQ ID NO: 64 AND SEQ ID NO: 134 TO SEQ ID NO: 141 (and more preferably the sub-group thereof consisting of SEQ ID NOS: 15, 16, 43, 44, 17, 18, 45, 46, 27, 28, 55, 56, 35 36 63 & 64); and optionally instructions for carrying out and evaluating the described method of methylation analysis. In one embodiment the base sequence of said oligonucleotides comprises at least one CpG, CpA or TpG dinucleotide. In a further embodiment said kit may further comprise one or a plurality of oligonucleotides consisting whose sequences in each case are identical, are complementary, or hybridise under stringent or highly stringent conditions to an at least 9 or more preferably 18 base long segment of a sequence selected from SEQ ID NO: 37 TO SEQ ID NO: 42 AND SEQ ID NO: 65 TO SEQ ID NO: 70 (and more preferably the sub-group thereof consisting of SEQ ID NOS: 15, 16, 43, 44, 17, 18, 45, 46, 27, 28, 55, 56, 35 36 63 & 64).

[0383] In a further embodiment, said kit may further comprise standard reagents for performing a CpG position-specific methylation analysis, wherein said analysis comprises one or more of the following techniques: MS-SNuPE, MSP, MethyLight™, HeavyMethyl, COBRA, and nucleic acid sequencing. However, a kit along the lines of the present invention can also contain only part of the aforementioned components.

[0384] In a preferred embodiment the kit may comprise additional bisulfite conversion reagents selected from the group consisting: DNA denaturation buffer; sulfonation buffer; DNA recovery reagents or kits (e.g., precipitation, ultrafiltration, affinity column); desulfonation buffer; and DNA recovery components.

[0385] In a further alternative embodiment, the kit may contain, packaged in separate containers, a polymerase and a reaction buffer optimised for primer extension mediated by the polymerase, such as PCR. In another embodiment of the invention the kit further comprising means for obtaining a biological sample of the patient. Preferred is a kit, which further comprises a container suitable for containing the means for determining methylation of at least one gene selected from the group consisting of RASSF2, TFAP2E, SND1, PCDHGC3, EDNRB, STOM, GLI3, RXFP3, LimK1, GPR73L1, PCDH10, DOCK10 and MRPS21 in the biological sample of the patient, and most preferably further comprises instructions for use and interpretation of the kit results. In a preferred embodiment the kit comprises: (a) a bisulfite reagent; (b) a container suitable for containing the said bisulfite reagent and the biological sample of the patient; (c) at least one set of primer oligonucleotides containing two oligonucleotides whose sequences in each case are identical, are complementary, or hybridise under stringent or highly stringent conditions to an at least 9 or more preferably 18 base long segment of a sequence selected from SEQ ID NO: 15 TO SEQ ID NO: 36 AND SEQ ID NO: 43 TO SEQ ID NO: 64 AND SEQ ID NO: 134 TO SEQ ID NO: 141 (and more preferably the sub-group thereof consisting of SEQ ID NOS: 15, 16, 43, 44, 17, 18, 45, 46, 27, 28, 55, 56, 35 36 63 & 64); and optionally (d) instructions for use and interpretation of the kit results. In an alternative preferred embodiment the kit comprises: (a) a bisulfite reagent; (b) a container suitable for containing the said bisulfite reagent and the biological sample of the patient; (c) at least one oligonucleotides and/or PNA-oligomer having a length of at least 9 or 16 nucleotides which is identical to or hybridises to a pre-treated nucleic acid sequence according to one of SEQ ID NO: 15 TO SEQ ID NO: 36 AND SEQ ID NO: 43 TO SEQ ID NO: 64 AND SEQ ID NO: 134 TO SEQ ID NO: 141 (and more preferably according to one of the sub-group thereof consisting of SEQ ID NOS: 15, 16, 43, 44, 17, 18, 45, 46, 27, 28, 55, 56, 35 36 63 & 64) and sequences complementary thereto; and optionally (d) instructions for use and interpretation of the kit results.

[0386] In an alternative embodiment the kit comprises: (a) a bisulfite reagent; (b) a container suitable for containing the said bisulfite reagent and the biological sample of the patient; (c) at least one set of primer oligonucleotides containing two oligonucleotides whose sequences in each case are identical, are complementary, or hybridise under stringent or highly stringent conditions to an at least 9 or more preferably 18 base long segment of a sequence selected from SEQ ID NO: 15 TO SEQ ID NO: 36 AND SEQ ID NO: 43 TO SEQ ID NO: 64 AND SEQ ID NO: 134 TO SEQ ID NO: 141 (and more preferably selected from the sub-group thereof consisting of SEQ ID NOS: 15, 16, 43, 44, 17, 18, 45, 46, 27, 28, 55, 56, 35 36 63 & 64); (d) at least one oligonucleotides and/or PNA-oligomer having a length of at least 9 or 16 nucleotides which is identical to or hybridises to a pre-treated nucleic acid sequence according to one of SEQ ID NO: 15 TO SEQ ID NO: 36 AND SEQ ID NO: 43 TO SEQ ID NO: 64 AND SEQ ID NO: 134 TO SEQ ID NO: 141 (and more preferably selected from the sub-group thereof consisting of SEQ ID NOS: 15, 16, 43, 44, 17, 18, 45, 46, 27, 28, 55, 56, 35 36 63 & 64) and sequences complementary thereto; and optionally (e) instructions for use and interpretation of the kit results.

[0387] Said kits may further comprise at least one set of primer oligonucleotides containing two oligonucleotides whose sequences in each case are identical, are complementary, or hybridise under stringent or highly stringent conditions to a 9 or more preferably 18 base long segment of a sequence selected from SEQ ID NO: 37 TO SEQ ID NO: 42 AND SEQ ID NO: 65 TO SEQ ID NO: 70.

[0388] The kit may also contain other components such as buffers or solutions suitable for blocking, washing or coating, packaged in a separate container.

[0389] Typical reagents (e.g., as might be found in a typical COBRA™-based kit) for COBRA™ analysis may include, but are not limited to: PCR primers for at least one gene selected from the group consisting of RASSF2, TFAP2E, SND1, PCDHGC3, EDNRB, STOM, GLI3, RXFP3, LimK1, GPR73L1, PCDH10, DOCK10 and MRPS21; restriction enzyme and appropriate buffer; gene-hybridization oligo; control hybridization oligo; kinase labeling kit for oligo probe; and labeled nucleotides. Typical reagents (e.g., as might be found in a typical MethyLight™-based kit) for MethyLight™ analysis may include, but are not limited to: PCR primers for the bisulfite converted sequence of at least one gene selected from the group consisting of RASSF2, TFAP2E, SND1, PCDHGC3, EDNRB, STOM, GLI3, RXFP3, LimK1, GPR73L1, PCDH10, DOCK10 and MRPS21; bisulfite specific probes (e.g. TaqMan™ or Lightcycler™); optimized PCR buffers and deoxynucleotides; and Taq polymerase.

[0390] Typical reagents (e.g., as might be found in a typical Ms-SNuPE™-based kit) for Ms-SNuPE™ analysis may include, but are not limited to: PCR primers for specific gene (or bisulfite treated DNA sequence or CpG island); optimized PCR buffers and deoxynucleotides; gel extraction kit; positive control primers; Ms-SNuPE™ primers for the bisulfite converted sequence of at least one gene selected from the group consisting of RASSF2, TFAP2E, SND1, PCDHGC3, EDNRB, STOM, GLI3, RXFP3, LimK1, GPR73L1, PCDH10, DOCK10 and MRPS21; reaction buffer (for the Ms-SNuPE reaction); and labelled nucleotides.

[0391] Typical reagents (e.g., as might be found in a typical MSP-based kit) for MSP analysis may include, but are not limited to: methylated and unmethylated PCR primers for the bisulfite converted sequence of or genomic sequence selected from the group consisting of RASSF2, TFAP2E, SND1, PCDHGC3, EDNRB, STOM, GLI3, RXFP3, LimK1, GPR73L1, PCDH10, DOCK10 and MRPS21, optimized PCR buffers and deoxynucleotides, and specific probes.

[0392] Moreover, an additional aspect of the present invention is an alternative kit comprising a means for determining methylation of at least one gene selected from the group consisting of RASSF2, TFAP2E, SND1, PCDHGC3, EDNRB, STOM, GLI3, RXFP3, LimK1, GPR73L1, PCDH10, DOCK10 and MRPS21, wherein said means comprise preferably at least one methylation specific restriction enzyme; one or a plurality of primer oligonucleotides (preferably one or a plurality of primer pairs) suitable for the amplification of a sequence comprising at least one CpG dinucleotide of a sequence selected from SEQ ID NO: 1 TO SEQ ID NO: 11 AND SEQ ID NO: 132 TO SEQ ID NO: 133 (and more preferably selected from the sub-group thereof consisting of SEQ ID NO: 1; SEQ ID NO: 2; SEQ ID NO: 7 & SEQ ID NO: 11); and optionally instructions for carrying out and evaluating the described method of methylation analysis. In one embodiment the base sequence of said oligonucleotides are identical, are complementary, or hybridise under stringent or highly stringent conditions to an at least 18 base long segment of a sequence selected from SEQ ID NO: 1 TO SEQ ID NO: 11 AND SEQ ID NO: 132 TO SEQ ID NO: 133 (and more preferably selected from the sub-group thereof consisting of SEQ ID NO: 1; SEQ ID NO: 2; SEQ ID NO: 7 & SEQ ID NO: 11). Preferably said kit further comprises one or a plurality of primer oligonucleotides (preferably one or a plurality of primer pairs) suitable for the amplification of a sequence comprising at least one CpG dinucleotide of a sequence selected from SEQ ID NO: 12 TO SEQ ID NO: 14.

[0393] In a further embodiment said kit may comprise one or a plurality of oligonucleotide probes for the analysis of the digest fragments, preferably said oligonucleotides are identical, are complementary, or hybridise under stringent or highly stringent conditions to an at least 16 base long segment of a sequence selected from SEQ ID NO: 1 TO SEQ ID NO: 11 AND SEQ ID NO: 132 TO SEQ ID NO: 133 (and more preferably selected from the sub-group thereof consisting of SEQ ID NO: 1; SEQ ID NO: 2; SEQ ID NO: 7 & SEQ ID NO: 11). In a further embodiment said kit may further comprise one or a plurality of oligonucleotide probes for the analysis of the digest fragments, preferably said oligonucleotides are identical, are complementary, or hybridise under stringent or highly stringent conditions to an at least 16 base long segment of a sequence selected from SEQ ID NO: 12 TO SEQ ID NO: 14.

[0394] In a preferred embodiment the kit may comprise additional reagents selected from the group consisting: buffer (e.g. restriction enzyme, PCR, storage or washing buffers); DNA recovery reagents or kits (e.g., precipitation, ultrafiltration, affinity column) and DNA recovery components.

[0395] In a further alternative embodiment, the kit may contain, packaged in separate containers, a polymerase and a reaction buffer optimised for primer extension mediated by the polymerase, such as PCR. In another embodiment of the invention the kit further comprising means for obtaining a biological sample of the patient. In a preferred embodiment the kit comprises: (a) a methylation sensitive restriction enzyme reagent; (b) a container suitable for containing the said reagent and the biological sample of the patient; (c) at least one set of oligonucleotides one or a plurality of nucleic acids or peptide nucleic acids which are identical, are complementary, or hybridise under stringent or highly stringent conditions to an at least 9 base long segment of a sequence selected from SEQ ID NO: 1 TO SEQ ID NO: 11 AND SEQ ID NO: 132 TO SEQ ID NO: 133 (and more preferably selected from the sub-group thereof consisting of SEQ ID NO: 1; SEQ ID NO: 2; SEQ ID NO: 7 & SEQ ID NO: 11); and optionally (d) instructions for use and interpretation of the kit results. In one embodiment said kit further comprises (e) at least one set of oligonucleotides one or a plurality of nucleic acids or peptide nucleic acids which are identical, are complementary, or hybridise under stringent or highly stringent conditions to an at least 9 base long segment of a sequence selected from SEQ ID NO: 12 TO SEQ ID NO: 14.

[0396] In an alternative preferred embodiment the kit comprises: (a) a methylation sensitive restriction enzyme reagent; (b) a container suitable for containing the said reagent and the biological sample of the patient; (c) at least one set of primer oligonucleotides suitable for the amplification of a sequence comprising at least one CpG dinucleotide of a sequence selected from SEQ ID NO: 1 TO SEQ ID NO: 11 AND SEQ ID NO: 132 TO SEQ ID NO: 133 (and more preferably selected from the sub-group thereof consisting of SEQ ID NO: 1; SEQ ID NO: 2; SEQ ID NO: 7 & SEQ ID NO: 11); and optionally (d) instructions for use and interpretation of the kit results. In one embodiment said kit further comprises (e) at least one set of primer oligonucleotides suitable for the amplification of a sequence comprising at least one CpG dinucleotide of a sequence selected from SEQ ID NO: 12 TO SEQ ID NO: 14.

[0397] In an alternative embodiment the kit comprises: (a) a methylation sensitive restriction enzyme reagent; (b) a container suitable for containing the said reagent and the biological sample of the patient; (c) at least one set of primer oligonucleotides suitable for the amplification of a sequence comprising at least one CpG dinucleotide of a sequence selected from SEQ ID NO: 1 TO SEQ ID NO: 11 AND SEQ ID NO: 132 TO SEQ ID NO: 133 (and more preferably selected from the sub-group thereof consisting of SEQ ID NO: 1; SEQ ID NO: 2; SEQ ID NO: 7 & SEQ ID NO: 11); (d) at least one set of oligonucleotides one or a plurality of nucleic acids or peptide nucleic acids which are identical, are complementary, or hybridise under stringent or highly stringent conditions to an at least 9 base long segment of a sequence selected from SEQ ID NO: 1 TO SEQ ID NO: 11 AND SEQ ID NO: 132 TO SEQ ID NO: 133 (and more preferably selected from the sub-group thereof consisting of SEQ ID NO: 1; SEQ ID NO: 2; SEQ ID NO: 7 & SEQ ID NO: 11) and optionally (e) instructions for use and interpretation of the kit results. In one embodiment said kit further comprises (f) at least one set of primer oligonucleotides suitable for the amplification of a sequence comprising at least one CpG dinucleotide of a sequence selected from SEQ ID NO: 12 TO SEQ ID NO: 14.

[0398] The kit may also contain other components such as buffers or solutions suitable for blocking, washing or coating, packaged in a separate container.

[0399] The invention further relates to a kit for use in providing a diagnosis of the presence of a cell proliferative disorder in a subject by means of methylation-sensitive restriction enzyme analysis. Said kit comprises a container and a DNA microarray component. Said DNA microarray component being a surface upon which a plurality of oligonucleotides are immobilized at designated positions and wherein the oligonucleotide comprises at least one CpG methylation site. At least one of said oligonucleotides is specific for the at least one gene selected from the group consisting of RASSF2, TFAP2E, SND1, PCDHGC3, EDNRB, STOM, GLI3, RXFP3, LimK1, GPR73L1, PCDH10, DOCK10 and MRPS21 and comprises a sequence of at least 15 base pairs in length but no more than 200 bp of a sequence according to one of SEQ ID NO: 1 TO SEQ ID NO: 11 AND SEQ ID NO: 132 TO SEQ ID NO: 133 (and more preferably selected from the sub-group thereof consisting of SEQ ID NO: 1; SEQ ID NO: 2; SEQ ID NO: 7 & SEQ ID NO: 11). Preferably said sequence is at least 15 base pairs in length but no more than 80 bp of a sequence according to one of SEQ ID NO: 1 TO SEQ ID NO: 11 AND SEQ ID NO: 132 TO SEQ ID NO: 133 (and more preferably selected from the sub-group thereof consisting of SEQ ID NO: 1; SEQ ID NO: 2; SEQ ID NO: 7 & SEQ ID NO: 11). It is further preferred that said sequence is at least 20 base pairs in length but no more than 30 bp of a sequence according to one of SEQ ID NO: 1 TO SEQ ID NO: 11 AND SEQ ID NO: 132 TO SEQ ID NO: 133 (and more preferably selected from the sub-group thereof consisting of SEQ ID NO: 1; SEQ ID NO: 2; SEQ ID NO: 7 & SEQ ID NO: 11). In a preferred embodiment said kit further comprises a sequence of at least 15 base pairs in length but no more than 200 bp of a sequence according to one of SEQ ID NO: 12 TO SEQ ID NO: 14. Preferably said sequence is at least 15 base pairs in length but no more than 80 bp of a sequence according to one of SEQ ID NO: 12 TO SEQ ID NO: 14. It is further preferred that said sequence is at least 20 base pairs in length but no more than 30 bp of a sequence according to one of SEQ ID NO: 12 TO SEQ ID NO: 14.

[0400] Said test kit preferably further comprises a restriction enzyme component comprising one or a plurality of methylation-sensitive restriction enzymes.

[0401] In a further embodiment said test kit is further characterized in that it comprises at least one methylation-specific restriction enzyme, and wherein the oligonucleotides comprise a restriction site of said at least one methylation specific restriction enzymes. The kit may further comprise one or several of the following components, which are known in the art for DNA enrichment a protein component, said protein binding selectively to methylated DNA; a triplex-forming nucleic acid component, one or a plurality of linkers, optionally in a suitable solution; substances or solutions for performing a ligation e.g. ligases, buffers; substances or solutions for performing a column chromatography; substances or solutions for performing an immunology based enrichment (e.g. immunoprecipitation); substances or solutions for performing a nucleic acid amplification e.g. PCR; a dye or several dyes, if applicable with a coupling reagent, if applicable in a solution; substances or solutions for performing a hybridization; and/or substances or solutions for performing a washing step.

[0402] The described invention further provides a composition of matter useful for the detection of colon cell proliferative disorders. Said composition comprising at least one nucleic acid 18 base pairs in length of a segment of the nucleic acid sequence disclosed in SEQ ID NO: 15 TO SEQ ID NO: 36 AND SEQ ID NO: 43 TO SEQ ID NO: 64 AND SEQ ID NO: 134 TO SEQ ID NO: 141 (and more preferably selected from the sub-group thereof consisting of SEQ ID NO: 1; SEQ ID NO: 2; SEQ ID NO: 7 & SEQ ID NO: 11), and one or more substances taken from the group comprising: 1-5 mM Magnesium Chloride, 100-500 μM dNTP, 0.5-5 units of taq polymerase, bovine serum albumen, an oligomer in particular an oligonucleotide or peptide nucleic acid (PNA)-oligomer, said oligomer comprising in each case at least one base sequence having a length of at least 9 nucleotides which is complementary to, or hybridizes under moderately stringent or stringent conditions to a pretreated genomic DNA according to one of the SEQ ID NO: 15 TO SEQ ID NO: 36 AND SEQ ID NO: 43 TO SEQ ID NO: 64 AND SEQ ID NO: 134 TO SEQ ID NO: 141 (and more preferably selected from the sub-group thereof consisting of SEQ ID NO: 1; SEQ ID NO: 2; SEQ ID NO: 7 & SEQ ID NO: 11) and sequences complementary thereto. In one aspect of the invention said composition further comprises an oligomer in particular an oligonucleotide or peptide nucleic acid (PNA)-oligomer, said oligomer comprising in each case at least one base sequence having a length of at least 9 nucleotides which is complementary to, or hybridizes under moderately stringent or stringent conditions to a pretreated genomic DNA according to one of the SEQ ID NO: 37 TO SEQ ID NO: 42 AND SEQ ID NO: 65 TO SEQ ID NO: 70 and sequences complementary thereto. It is preferred that said composition of matter comprises a buffer solution appropriate for the stabilization of said nucleic acid in an aqueous solution and enabling polymerase based reactions within said solution. Suitable buffers are known in the art and commercially available.

[0403] In further preferred embodiments of the invention said at least one oligomer is at least 50, 100, 150, 200, 250 or 500 base pairs in length of a segment of the nucleic acid sequence disclosed in SEQ ID NO: 15 TO SEQ ID NO: 36 AND SEQ ID NO: 43 TO SEQ ID NO: 64 AND SEQ ID NO: 134 TO SEQ ID NO: 141, or SEQ ID NO: 37 TO SEQ ID NO: 42 AND SEQ ID NO: 65 TO SEQ ID NO: 70.

[0404] While the present invention has been described with specificity in accordance with certain of its preferred embodiments, the following examples serve only to illustrate the invention and are not intended to limit the invention within the principles and scope of the broadest interpretations and equivalent configurations thereof.

### EXAMPLES

### Example 1

[0405] In the following example a variety of assays suitable for the methylation analysis of the genes and genomic sequences according to tables 1 and 2 were designed, in order to validate the suitable of said markers for the detection of colorectal carcinoma. Furthermore the performance of gene panels (combinations of a plurality of markers) was assessed, of particular interest were panels comprising the gene Septin 9 that provided improved accuracy over the use of Septin 9 alone.

[0406] The assays were designed to be run on the LightCycler platform (Roche Diagnostics), but other such instruments commonly used in the art are also suitable. The assays were MSP assays. MSP amplificates were designed to be detected by means of Taqman style fluorescent labelled detection probes.

[0407] Samples

[0408] In total 314 samples were analysed:

[0409] 198 colorectal carcinoma of the following stages:
[0410] Stage 0: 4 samples
[0411] Stage 1: 19 samples
[0412] Stage 2: 84 samples
[0413] Stage 3: 57 samples
[0414] Stage 4: 20 samples
[0415] Stage unknown: 14 samples

[0416] 22 normal or normal adjacent tissue

[0417] 26 whole blood samples

[0418] 40 other cancers (liver, breast & prostate)

[0419] 28 other normal or normal adjacent tissues (liver, breast & prostate)

[0420] DNA Extraction and Bisulfite Treatment

[0421] The DNA was isolated from the all samples according to a modified protocol based on that disclosed in the Qiagen Genomic DNA Handbook (August 2001) (pg 28-31, 44-47). The eluate resulting from the purification was then converted according to the following bisulfite reaction.

[0422] The eluate was mixed with 354 μl of bisulfite solution (5.89 mol/l) and 146 μl of dioxane containing a radical scavenger (6-hydroxy-2,5,7,8-tetramethylchromane 2-carboxylic acid, 98.6 mg in 2.5 ml of dioxane). The reaction mixture was denatured for 3 min at 99° C. and subsequently incubated at the following temperature program for a total of 7 h min 50° C.; one thermospike (99.9° C.) for 3 min; 1.5 h 50° C.; one thermospike (99° C.) for 3 min; 3 h 50° C. The reaction mixture was subsequently purified by ultrafiltration using a Millipore Microcon™ column. The purification was conducted essentially according to the manufacturer's instructions. For this purpose, the reaction mixture was mixed with 300 μl of water, loaded onto the ultrafiltration membrane, centrifuged for 15 min and subsequently washed with 1×TE buffer. The DNA remains on the membrane in this treatment. Then desulfonation is performed. For this purpose, 0.2 mol/1 NaOH was added and incubated for 10 min. A centrifugation (10 min) was then conducted, followed by a washing step with 1×TE buffer. After this, the DNA was eluted. For this purpose, the membrane was mixed for 10 minutes with 75 μl of warm 1×TE buffer (50° C.). The membrane was turned over according to the manufacturer's instructions. Subsequently a repeated centrifugation was conducted, with which the DNA was removed from the membrane. 10 μl of the eluate was utilized for the Lightcycler Real Time PCR assay.

[0423] PCR assay component sequences and thermal cycling conditions are provided in Table 3.

[0424] Control Assay

[0425] The GSTP1-C3 assay design makes it suitable for quantitating DNAs from different sources, including fresh/frozen samples, remote samples such as plasma or serum, and DNA obtained from archival specimen such as paraffin embedded material. The following oligonucleotides were used in the reaction to amplify the control amplificate:

Control Primer1:
(SEQ ID NO: 71)
GGAGTGGAGGAAATTGAGAT
Control Primer2:
(SEQ ID NO: 72)
CCACACAACAAATACTCAAAAC
Control Probe:
(SEQ ID NO: 73)
FAM-TGGGTGTTTGTAATTTTTGTTTTGTGTTAGGTT-TAMRA

[0426] Cycle program (40 cycles): 95° C., 10 min

[0427] Data Interpretation

[0428] Calculation of DNA Concentration.

[0429] The Cp (crossing point values) as calculated by the Lightcycler instrument software were used to determine DNA concentration. The DNA concentration was calculated by reference of the CP value of each well to a standard curve for both the methylation assays and the C3 assay.

[0430] Percentage Methylation

[0431] For each sample the detected percentage methylation was calculated as the measured concentration of DNA quantified using the methylation assays over the concentration of DNA in the sample as quantified by the C3 assay.

[0432] Detection of methylation was determined at multiple different threshold levels, see tables) as well as at all methylation levels (i.e. any samples wherein methylation was detected were deemed positive).

[0433] The sensitivity of each assay was determined from the colorectal carcinoma sample positive detection rate, wherein sensitivity was determined as the % samples wherein methylation was positively detected (i.e. true positives).

[0434] The specificity of each assay was determined from the whole blood sample negative detection rate (i.e. true negative detection rate) wherein false positives were discounted from the total number of analysed samples.

[0435] Results

[0436] The AUC of each analyzed marker both alone or in some cases in combination with other markers is provided in Tables 4 to 6 (with the exception of MRPS21 & DOCK10). The term ‘AUC’ is an abbreviation for the area under a curve. In particular it refers to the area under a Receiver Operating Characteristic (ROC) curve. The ROC curve is a plot of the true positive rate against the false positive rate for the different possible cut points of a diagnostic test. It shows the trade-off between sensitivity and specificity depending on the selected cut point (any increase in sensitivity will be accompanied by a decrease in specificity). The area under an ROC curve (AUC) is a measure for the accuracy of a diagnostic test (the larger the area the better, optimum is 1, a random test would have a ROC curve lying on the diagonal with an area of 0.5; for reference: J. P. Egan. Signal Detection Theory and ROC Analysis, Academic Press, New York, 1975).

[0437] Table 4 provides an overview of the measured AUC of each marker in the detection of colorectal carcinoma at all methylation levels, provides information on their complementarity to Septin 9, and also their methylation AUC in whole blood. It is necessary to determine the methylation of a marker in whole blood, as the preferred sample type for a screening assay would be blood, accordingly markers that are methylated in both blood and cancer are not preferred.

[0438] Table 5 provides an overview of the measured AUC of each marker in the detection of colorectal carcinoma at methylation cut off values of 10%, 20% and 30%.

[0439] Table 6 provides an overview of the measured AUC of panels of markers comprising the gene Septin 9 and 2 further markers in the detection of colorectal carcinoma at methylation cut off values of 0%, 10%, 20% and 30%. The panel data was compiled by determining the proportion or number of the analysed samples with methylation measured within a given threshold using at least one assay of the panel.

[0440] For MRPS21 & DOCK10 assay performance is provided in FIGS. 27 and 28. Sensitivity of the DOCK10 assay was 0.48 as measured at a specificity of 0.97 (cut off was −3). Sensitivity of the MRPS21 assay was 0.63 as measured at a specificity of 0.96 (cut off was −1.422).

### Example 2

[0441] In the following investigation, the performance of selected markers from example 1, according to Table 7 were selected for further analysis by means of the HM (Heavymethy) assay. Target regions of each gene were bisulfite converted and amplified by means of non-MSP primers, in the presence of a blocker oligonucleotides designed to suppress amplificates that had not been methylated prior to bisulfite treatment. Amplificates were then detected by means of Lightcycler (dual) probes.

[0442] Plasma samples from the following patient classes were analysed:
[0443] Colorectal carcinoma (131 total)

[0444] Stage 0=1

[0445] Stage I=13

[0446] Stage II=32

[0447] Stage III=27

[0448] Stage IV=8

[0449] Unclassified=50
[0450] Healthy colorectal (colonoscopy verified)=169
[0451] Non-cancerous diseases (NCD)=29
[0452] Cancers of non-colorectal origin (NCC)=31

[0453] In total 360 samples were analysed.

[0454] DNA Extraction and Bisulfite Treatment

[0455] The DNA was isolated from the all samples by means of the Magna Pure method (Roche) according to the manufacturer's instructions. The eluate resulting from the purification was then converted according to the following bisulfite reaction.

[0456] The eluate was mixed with 354 μl of bisulfite solution (5.89 mol/1) and 146 μl of dioxane containing a radical scavenger (6-hydroxy-2,5,7,8-tetramethylchromane 2-carboxylic acid, 98.6 mg in 2.5 ml of dioxane). The reaction mixture was denatured for 3 min at 99° C. and subsequently incubated at the following temperature program for atotal of 7 h min 50° C.; one thermospike (99.9° C.) for 3 min; 1.5 h 50° C.; one thermospike (99° C.) for 3 min; 3 h 50° C. The reaction mixture was subsequently purified by ultrafiltration using a Millipore Microcon™ column. The purification was conducted essentially according to the manufacturer's instructions. For this purpose, the reaction mixture was mixed with 300 μl of water, loaded onto the ultrafiltration membrane, centrifuged for 15 min and subsequently washed with 1×TE buffer. The DNA remains on the membrane in this treatment. Then desulfonation is performed. For this purpose, 0.2 mol/1 NaOH was added and incubated for 10 min. A centrifugation (10 min) was then conducted, followed by a washing step with 1×TE buffer. After this, the DNA was eluted. For this purpose, the membrane was mixed for 10 minutes with 75 μl of warm 1×TE buffer (50° C.). The membrane was turned over according to the manufacturer's instructions. Subsequently a repeated centrifugation was conducted, with which the DNA was removed from the membrane. 10 μl of the eluate was utilized for the Lightcycler Real Time PCR assay.

[0457] Reaction Solutions and Thermal Cycling Conditions

[0458] PCR assay component sequences are provided in Table 10. Each assay was performed twice (independently) in each sample.

[0459] Thermal cycling conditions were:

| | | | | |
|---|---|---|---|---|
| PCDHGC3 activation: | 95° C. | 10 | min | |
| 50 cycles: | 95° C. | 10 | sec | (20° C./s) |
| | 56° C. | 30 | sec | (20° C./s) |
| | 60° C. | 3 | sec | (20° C./s)detection |
| | 72° C. | 10 | sec | (20° C./s) |
| melting curve: | 95° C. | 10 | sec | (20° C./s) |
| | 40° C. | 10 | sec | (20° C./s) |
| | 95° C. | 0 | sec | (0.1° C./s)Continuous |
| cooling: | 40° C. | 5 | sec | |
| All other assays: | | | | |
| activation: | 95° C. | 10 | min | |
| 55 cycles: | 95° C. | 10 | sec | (20° C./s) |
| | 56° C. | 30 | sec | (20° C./s)detection |
| | 72° C. | 10 | sec | (20° C./s) |
| melting curve: | 95° C. | 10 | sec | (20° C./s) |
| | 40° C. | 10 | sec | (20° C./s) |
| | 95° C. | 0 | sec | (0.1° C./s)Continuous |
| cooling: | 40° C. | 5 | sec | |

[0460] Results:

[0461] In order to predict the presence of CRC tumor DNA in the measured plasma samples we use a logistic regression model. The logistic regression model is build as follows.

[0462] First the measurement data for each marker assay is encoded in a qualitative way by the following 3 levels:
[0463] Level0—both replicate PCR reactions showed no amplification
[0464] Level1—exactly one of the two PCR replicates showed an amplification curve
[0465] Level2—both of the two PCR replicates showed amplification curves

[0466] If any of the two PCR replicates could not be successfully measured the respective marker measurement was regarded as invalid.

[0467] The five different DNA methylation markers were used as independent factors with 3 levels in a logistic regression model. An additional intercept factor but no factor interactions were included in the model. The logistic regression model was trained and optimal weights for all factor levels were determined by using the maximum likelihood procedure.

[0468] FIGS. 1 to 10 provide the plots of the measured log mean methylation of the individual assays. Each figures consists of three plots, the upper and lower left hand side plots provide the binary and multiclass analysis respectively, the right hand plot provides an ROC wherein sensitivity is shown on the Y-axis and 1-specificity is shown on the X-axis. Table 8 and FIGS. 1 to 5 provide an overview of marker performances in all sample groups. Table 9 and FIGS. 6 to 10 provide an overview of marker performances in the colorectal carcinoma and normal colorectal groups.

[0469] FIGS. 12 to 21 provide the plots of the measured log majority mean (analysed sample is only counted as positive if both replicates are positive, the mean of the two measurements is taken as the quantitative methylation measurement) methylation of the individual assays. Each figures consists of three plots, the upper and lower left hand side plots provide the binary and multiclass analysis respectively, the right hand plot provides an ROC wherein sensitivity is shown on the Y-axis and 1-specificity is shown on the X-axis. Table 12 and FIGS. 12 to 16 provide an overview of marker performances in all sample groups. Table 13 and FIGS. 18 to 21 provide an overview of marker performances in the colorectal carcinoma and normal colorectal groups.

[0470] Table 11 provides an overview of the AUC and snd sensitivities of the single assays at 95% specificity (all p-values were less than 0.00001). Wherein said classes are:

[0471] All: Normal+NCD+NCC vs. CRC stages I to IV

[0472] I-IV: Normal vs. CRC stages I to IV

[0473] I-III: Normal vs. CRC stages I to III

[0474] From the multiclass distribution of FIG. 6 (bottom left hand plot) and table 11 it can be determined that the gene RASSF2 is particularly effective at detecting Stage 1 and early colorectal carcinomas. Accordingly expression, most preferably CpG methylation, of said gene is in additioan to being a preferred diagnostic marker is particularly preferred for the screening of general populations (individuals not displaing any indicators or symptoms of colorectal carcinoma) for the early detection of colorectal carcinomas.

[0475] Marker Combinations (Panels)

[0476] To identify the subset of DNA methylation markers that optimally predicts the presence of CRC we use the backward elimination procedure. In each elimination step the DNA methylation marker with the lowest factor levels was removed from the model. We compared the predictive power of the reduced model with the complete model by using the likelihood ratio test. To identify the subset of DNA methylation markers that optimally predicts the presence of CRC we use the backward elimination procedure. In each elimination step the DNA methylation marker with the lowest factor levels was removed from the model. We compared the predictive power of the reduced model with the complete model by using the likelihood ratio test. FIG. 11 shows that (in the Normal vs. CRC stages I to IV comparison) at each elimination step the predictive power of the logistic regression model was significantly reduced. We conclude that all listed DNA methylation marker models give superior prediction performance as compared to the single marker or the respective simpler marker panels.

[0477] We conclude that the following DNA marker models give superior prediction performance as compared to the single marker or the respective simpler marker panels.

[0478] FIGS. 22 to 26 provide an overview of the performance of the following marker combinations:

Septin 9 + TFAP2E + RASSF2 + PCDHGC3 + SND1 (FIG. 22)

| All | AUC 80 | |
|---|---|---|
| | Sens/Spec | 57/95 |
| All CRC | CRC AUC 80 | |
| | Sens/Spec | 58/96 |
| CRC I-III | AUC 76 | |
| | Sens/Spec | 50/96 |

Septin 9 + TFAP2E + RASSF2 + PCDHGC3 (FIG. 23)

| | | |
|---|---|---|
| All | AUC 80 | |
| | Sens/Spec | 53/95 |
| All CRC | AUC 80 | |
| | Sens/Spec | 55/96 |
| CRC I-III | AUC 77 | |
| | Sens/Spec | 48/96 |

Septin 9 + TFAP2E + RASSF2 (FIG. 24)

| | | |
|---|---|---|
| All | AUC 77 | |
| | Sens/Spec | 48/96 |
| All CRC | AUC 79 | |
| | Sens/Spec | 52/96 |
| CRC I-III | AUC 75 | |
| | Sens/Spec | 42/96 |

Septin 9 + TFAP2E (FIG. 25)

| | | |
|---|---|---|
| All | AUC 77 | |
| | Sens/Spec | 45/96 |
| All CRC | AUC 79 | |
| | Sens/Spec | 51/96 |
| CRC I-III | AUC 75 | |
| | Sens/Spec | 41/96 |

Septin 9 + RASSF2 (FIG. 26)

| | | |
|---|---|---|
| All | AUC 77 | |
| | Sens/Spec | 43/96 |
| All CRC | AUC 79 | |
| | Sens/Spec | 56/95 |
| CRC I-III | AUC74 | |
| | Sens/Spec | 46/95 |

[0479] In each case the upper plot shows all samples (Normals, Non Colorectal Disease, Non Coloretal Cancers and all CRC stages), the lower plot shows only Normal and CRC samples.

TABLE 1
Sequences according to the present invention.

| | | Methylated | Methylated | Unmethylated | Unmethylated |
|---|---|---|---|---|---|
| | | bisulfite | bisulfite | bisulfite | bisulfite |
| Genomic | | converted | converted | converted | converted |
| SEQ ID | | sequence | sequence | sequence | sequence |
| NO: | Gene | (sense) | (antisense) | (sense) | (antisense) |
| 1 | SND1 | 15 | 16 | 43 | 44 |
| 2 | PCDHGC3 | 17 | 18 | 45 | 46 |
| 3 | EDNRB | 19 | 20 | 47 | 48 |
| 4 | STOM | 21 | 22 | 49 | 50 |
| 5 | GLI3 | 23 | 24 | 51 | 52 |
| 6 | RXFP3 | 25 | 26 | 53 | 54 |
| 7 | RASSF2 | 27 | 28 | 55 | 56 |
| 8 | Q8N2B6 | 29 | 30 | 57 | 58 |
| 9 | PCDH10 | 31 | 32 | 59 | 60 |
| 10 | LIMK1 | 33 | 34 | 61 | 62 |
| 11 | TFAP2E | 35 | 36 | 63 | 64 |
| 12 | Septin 9 | 37 | 38 | 65 | 66 |
| 13 | Septin 9 CpG island | 39 | 40 | 67 | 68 |
| 14 | Septin 9 CpG island | 41 | 42 | 69 | 70 |
| 132 | MRPS21 | 134 | 135 | 138 | 139 |
| 133 | DOCK10 | 136 | 137 | 140 | 141 |

TABLE 2
Genes according to the present invention

| Genomic | | | | |
|---|---|---|---|---|
| SEQ ID | | | Chromosomal | |
| NO: | Gene | Abbreviation | location* | Contig location* |
| 1 | Staphylococcal | SND1 | 7 | AC008039.1.1.197346 |
| | nuclease | | 127530240 to | 141230 to 143740 (+) |
| | domain- | | 127532750 (+) | |
| | containing | | | |
| | protein 1 (p100 | | | |
| | coactivator) | | | |
| | (100 kDa | | | |
| | coactivator) | | | |
| | (EBNA2 | | | |
| | coactivator p100) | | | |
| 2 | Protocadherin | PCDHGC3 | 5 | AC008781.7.1.205516 |
| | gamma C5 | | 140835658 to | 172908 to 175190 (−) |
| | precursor | | 140837940 (+) | |
| | (PCDH-gamma- | | | |
| | C5) | | | |
| 3 | Endothelin B | EDNRB | 13 | AL139002.18.1.183337 |
| | receptor | | 77390505 to | 92863 to 95098 (+) |
| | precursor | | 77392740 (+) | |
| 4 | Erythrocyte band | STOM | 9 | x |
| | 7 integral | | 123171727 to | |
| | membrane | | 123172921 (+) | |
| | protein | | | |
| | (Stomatin) | | | |
| | (Protein 7.2b) | | | |
| 5 | Zinc finger | GLI3 | 7 | AC005158.3.1.266344 |
| | protein GLI3 | | 42234131 to | 110482 to 110788 (+) |
| | | | 42234437 (+) | |
| 6 | Relaxin 3 | RXFP3 | 5 | AC139777.3.1.169254 |
| | receptor 1 | | 33970963 to | 141119 to 143465 (+) |
| | | | 33973309 (+) | |
| 7 | Ras association | RASSF2 | 20 | AL133354.14.1.59726 |
| | domain family 2 | | 4750982 to | 44336 to 46255 (+) |
| | | | 4752901 (+) | |
| 8 | Prokineticin | GPR73L1 | 20 | AL121757.7.1.167013 |
| | receptor 2 (PK- | | 5245129 to | 166111 to 166917 (−) |
| | R2) (G protein- | | 5245935 (+) | |
| | coupled receptor | | | |
| | 73-like 1) | | | |
| | (GPR73b) | | | |
| | (GPRg2) | | | |
| 9 | Protocadherin | PCDH10 | 4 | AC105383.3.1.173956 |
| | gamma C5 | | 134291880 to | 116476 to 118726 (+) |
| | precursor | | 134294130 (+) | |
| | (PCDH-gamma- | | | |
| | C5) | | | |
| 10 | LIM domain | LIMK1 | 7 | AC005056.2.1.98188 |
| | kinase 1 (EC | | 73145461 to | 7 to 947 (−) |
| | 2.7.1.37) | | 73146401 (+) | |
| 11 | transcription | TFAP2E | 1 | AC004865.1.1.120088 |
| | factor AP-2 | | 35814650 to | 1091 to 2889 (−) |
| | epsilon | | 35816448 (+) | |
| | (activating | | | |
| | enhancer binding | | | |
| | protein 2 epsilon) | | | |
| 12 | Septin-9 (MLL | Septin 9 | 17 72789082 | AC068594.15.1.168501 |
| | septin-like fusion | | to 73008258 | 150580 to 151086 (+) to |
| | protein) (MLL | | (+)** | AC111170.11.1.158988 |
| | septin-like fusion | | | 137268 to 138151 (+)** |
| | protein MSF-A) | | | |
| | (Ovarian/Breast | | | |
| | septin) (Ov/Br | | | |
| | septin) (Septin | | | |
| | D1) | | | |
| 13 | Septin 9 CpG | Septin 9 CpG | 17 72789082 to | AC068594.15.1.168501 |
| | island | island | 72789757 (+) | 150580 to 151255 (+)** |
| | | | ** | |
| 14 | Septin 9 CpG | Septin 9 CpG | | |
| | island | island | | |
| 132 | MRPS21 | Dedicator of | | |
| | | cytokinesis | | |
| | | protein 10 | | |
| | | (Protein | | |
| | | zizimin 3) | | |
| 133 | DOCK10 | Mitochondrial | | |
| | | 28S | | |
| | | ribosomal | | |
| | | protein S21 | | |
| | | (MRP-S21) | | |
| | | (MDS016) | | |

*Unless otherwise stated all locations refer to Ensembl database v39 (June 2006)
**Ensembl database v31.35d (8 Jul. 2005)

TABLE 3
Assay components according to Example 1

| | Forward | Reverse | | | | | | | |
|---|---|---|---|---|---|---|---|---|---|
| | primer | primer | Probe | PCR conditions | | | | | |
| | SEQ ID | SEQ ID | SEQ ID | Activation | | Cycling (50x) | | | |
| Gene name | NO: | NO: | NO: | degrees C. | time | degrees C. | time | degrees C. | time |
| LHFPL3 | 74 | 75 | 76 | | | | | | |
| PCDHGC3 | 77 | 78 | 79 | 95 | 10 min | 95 | 15 sec | 60 | 60 sec |
| EDNRB | 80 | 81 | 82 | 95 | 10 min | 95 | 15 sec | 60 | 60 sec |
| RASSF2 | 83 | 84 | 85 | 95 | 10 min | 95 | 15 sec | 60 | 60 sec |
| STOM | 86 | 87 | 88 | 95 | 10 min | 95 | 15 sec | 60 | 60 sec |
| TFAP2E | 89 | 90 | 91 | 95 | 10 min | 95 | 15 sec | 60 | 60 sec |
| GLI3 | 92 | 93 | 94 | 95 | 10 min | 95 | 15 sec | 62 | 60 sec |
| RXFP3 | 95 | 96 | 97 | 95 | 10 min | 95 | 15 sec | 60 | 60 sec |
| LimK1 | 98 | 99 | 100 | 95 | 10 min | 95 | 15 sec | 60 | 60 sec |
| GPR73L1 | 101 | 102 | 103 | 95 | 10 min | 95 | 15 sec | 60 | 60 sec |
| PCDH10 | 104 | 105 | 106 | 95 | 10 min | 95 | 15 sec | 62 | 60 sec |
| MRPS21 | 142 | 143 | 144 | 95 | 10 min | 95 | 15 sec | 60 | 60 sec |
| DOCK10 | 145 | 146 | 147/148 | 95 | 10 min | 95 | 15 sec | 62 | 60 sec |

TABLE 4
AUC of colorectal carcinoma detection according to
Example 1 with methylation above 0% (single genes).

| Marker | AUC | Complementarity to Septin 9 | Whole Blood |
|---|---|---|---|
| SND1 | 0.92 | 0.04 | 0.00 |
| PCDHGC3 | 0.91 | 0.04 | 0.08 |
| RASSF2 | 0.86 | 0.04 | 0.00 |
| EDNRB | 0.94 | 0.04 | 0.00 |
| STOM | 0.86 | 0.03 | 0.04 |
| Septin 9 | 0.97 | | 0.04 |
| LimK1 | 0.83 | 0.07 | 0.00 |
| TFAP2E | 0.76 | 0.06 | 0.00 |
| GLI3 | 0.71 | 0.04 | 0.00 |
| GPR73L1 | 0.97 | 0.03 | 0.08 |
| RXFP3 | 0.96 | 0.02 | 0.08 |
| PCDH10 | 0.95 | 0.03 | 0.00 |
| MRPS21 | 0.85 | | |
| DOCK10 | 0.73 | | |

TABLE 5
AUC of colorectal carcinoma detection according to Example 1
with methylation within various thresholds (single genes).

| | CRC detection rate at various | | |
|---|---|---|---|
| | methylation thresholds | | |
| Marker | 10% | 20% | 30% |
| Septin 9 | 0.92 | 0.85 | 0.74 |
| SND1 | 0.70 | 0.57 | 0.46 |
| PCDHGC3 | 0.73 | 0.54 | 0.38 |
| RASSF2 | 0.73 | 0.54 | 0.33 |
| EDNRB | 0.71 | 0.54 | 0.41 |
| STOM | 0.71 | 0.57 | 0.42 |
| LimK1 | 0.91 | 0.85 | 0.73 |
| TFAP2E | 0.97 | 0.87 | 0.59 |
| GLI3 | 0.80 | 0.64 | 0.44 |
| GPR73L1 | 0.80 | 0.57 | 0.37 |
| RXFP3 | 0.66 | 0.38 | 0.18 |
| PCDH10 | 0.91 | 0.70 | 0.37 |

TABLE 6
AUC of colorectal carcinoma detection samples
according to Example 1 with methylation within
various thresholds (Septin 9 marker panels).

CRC detection rate at various
methylation thresholds

| Septin 9 + 2 markers | 0% | 10% | 20% | 30% |
|---|---|---|---|---|
| Septin 9 | 0.97 | 0.92 | 0.85 | 0.74 |
| TFAP2E + LimK1 | 0.84 | 0.98 | 0.97 | 0.89 |
| GLI3 + LimK1 | 0.88 | 0.97 | 0.95 | 0.88 |
| EDNRB + SND1 | 0.94 | 0.96 | 0.90 | 0.83 |
| PCDHGC3 + RASSF2 | 0.93 | 0.96 | 0.92 | 0.83 |
| PCDHGC3 + SND1 | 0.94 | 0.96 | 0.92 | 0.84 |

TABLE 7
Particularly preferred genes and sequences
thereof according to the present invention

| | | Methylated | Methylated | Unmethylated | Unmethylated |
|---|---|---|---|---|---|
| | | bisulfite | bisulfite | bisulfite | bisulfite |
| Genomic | | converted | converted | converted | converted |
| SEQ ID | | sequence | sequence | sequence | sequence |
| NO: | Gene | (sense) | (antisense) | (sense) | (antisense) |
| 1 | SND1 | 15 | 16 | 43 | 44 |
| 2 | PCDHGC3 | 17 | 18 | 45 | 46 |
| 7 | RASSF2 | 27 | 28 | 55 | 56 |
| 11 | TFAP2E | 35 | 36 | 63 | 64 |

TABLE 8
HM assay (Example 2) performance in all tissue samples.

| | RASSF2 | Septin 9 | SND1 | PCDHGC3 | TFAP2E |
|---|---|---|---|---|---|
| AUC (95% confidence | 0.72 (0.67, 0.77) | 0.75 (0.7, 0.79) | 0.66(0.6, 0.71) | 0.66(0.61, 0.72) | 0.69 (0.63, 0.74) |
| interval) | | | | | |
| Sens/Spec | 0.4/0.95 | 0.47/0.95 | 0.25/0.95 | 0.32/0.95 | 0.29/0.95 |
| Sens/Spec cut off | −3.029 | −2.706 | −3.089 | −2.378 | −2.692 |
| Wilcoxon P | 0 | 0 | 0 | 0 | 0 |
| CRC + Adenoma - | 131 | 131 | 118 | 119 | 119 |
| (pos) | | | | | |
| Normal + non- | 228 | 228 | 205 | 206 | 206 |
| cancerous diseases | | | | | |
| (NCD) + carcinoma | | | | | |
| other than | | | | | |
| colorectal (NCC) - | | | | | |
| (neg) | | | | | |

TABLE 9
HM assay (Example 2) performance in colorectal carcinoma and normal colorectal tissue samples.

| | RASSF2 | Septin 9 | SND1 | PCDHGC3 | TFAP2E |
|---|---|---|---|---|---|
| AUC (95% confidence | 0.73(0.67, 0.78) | 0.76(0.7, 0.8) | 0.67(0.61, 0.73) | 0.68(0.62, 0.73) | 0.71(0.65, 0.76) |
| interval) | | | | | |
| Sens/Spec | 0.47/0.95 | 0.48/0.95 | 0.39/0.95 | 0.32/0.95 | 0.39/0.95 |
| Sens/Spec cut off | −3.272 | −2.858 | −3.473 | −2.417 | −3.446 |
| Wilcoxon P | 0 | 0 | 0 | 0 | 0 |
| CRC + Adenoma (pos) | 131 | 131 | 118 | 119 | 119 |
| Normal (neg) | 168 | 169 | 148 | 148 | 148 |

TABLE 10
Primer, blocker and probe sequences according to Example 2.

| | Septin 9 | RASSF2 | SND1 | PCDHGC3 | TFAP2E |
|---|---|---|---|---|---|
| Forward primer SEQ ID NO: | 107 | 112 | 117 | 122 | 127 |
| Reverse primer SEQ ID NO: | 108 | 113 | 118 | 123 | 128 |
| Blocker SEQ ID NO: | 109 | 114 | 119 | 124 | 129 |
| Probe SEQ ID NO: | 110 | 115 | 120 | 125 | 130 |
| Probe SEQ ID NO: | 111 | 116 | 121 | 126 | 131 |

TABLE 11
AUC and sensitivity (at 95% specificity) for single assays of markers
according to class.*

| | AUC | | | Sensitivity | | |
|---|---|---|---|---|---|---|
| | All | I-IV | I-II | All | I-IV | I-II |
| Septin 9 (Majority mean) | 73 | 73 | 67 | 49 | 49 | 37 |
| RASSF2 (Log Mean) | 72 | 73 | 70 | 45 | 48 | 41 |
| TFAP2E (Log Mean) | 68 | 71 | 67 | 32 | 38 | 30 |
| SND1 (Log Mean) | 64 | 65 | 62 | 25 | 35 | 29 |
| PCDHGC3 (Log Mean) | 65 | 66 | 64 | 30 | 32 | 29 |

*all p-values were less than 0.00001

TABLE 12
HM assay (Example 2) performance in all tissue samples.

| | RASSF2 | Septin 9 | SND1 | PCDHGC3 | TFAP2E |
|---|---|---|---|---|---|
| AUC (95% confidence | 0.67(0.62, 0.72) | 0.74(0.69, 0.79) | 0.63(0.57, 0.68) | 0.65(0.6, 0.7) | 0.65(0.6, 0.7) |
| interval) | | | | | |
| Sens/Spec | 0.37(0.96) | 0.51 | 0.28/0.95 | 0.34/0.95 | 0.34/0.96 |
| Sens/Spec cut off | −4 | −4 | −3.45 | −2.523 | −4 |
| Wilcoxon P | 0 | 0 | 0 | 0 | 0 |
| CRC+Adenoma -(pos) | 121 | 127 | 113 | 127 | 120 |
| Normal + non-cancerous | 206 | 220 | 194 | 224 | 203 |
| diseases | | | | | |
| (NCD) + carcinoma other | | | | | |
| than colorectal (NCC) - | | | | | |
| (neg) | | | | | |

TABLE 13
HM assay (Example 2) performance in colorectal carcinoma and normal colorectal tissue samples.

| | RASSF2 | Septin 9 | SND1 | PCDHGC3 | TFAP2E |
|---|---|---|---|---|---|
| AUC (95% confidence | 0.67(0.61, 0.73) | 0.74(0.69, 0.79) | 0.64(0.58, 0.7) | 0.66(0.6, 0.71) | 0.66(0.6, 0.72) |
| interval) | | | | | |
| Sens/Spec | 0.37/0.97 | 0.51/0.97 | 0.3/0.97 | 0.35/0.95 | 0.34/0.98 |
| Sens/Spec cut off | −4 | −4 | −4 | −2.599 | −4 |
| Wilcoxon P | 0 | 0 | 0 | 0 | 0 |
| CRC + Adenoma (pos) | 121 | 121 | 113 | 127 | 120 |
| Normal (neg) | 154 | 164 | 146 | 167 | 154 |

1-34. (canceled)

35. A method for detecting the methylation status of a gene in genomic DNA in a sample from a subject, comprising the steps of:
a) isolating genomic DNA comprising a gene comprising the sequence of SEQ ID NO: 5 from a sample obtained from the subject;
b) treating the isolated genomic DNA comprising the gene, or a fragment thereof, with bisulfite such that non-methylated cytosines are converted to uracil;
c) contacting the bisulfite-treated genomic DNA comprising the gene, or the bisulfite-treated fragment thereof, with an amplification enzyme and at least one primer comprising a contiguous sequence of at least 9 nucleotides that is identical to, complementary to, or hybridizes under moderately stringent or stringent conditions to, a sequence selected from the group consisting of SEQ ID NOs: 23, 24, 51 and 52, and complements thereof, wherein the bisulfite-treated genomic DNA or the bisulfite-treated fragment thereof, is either amplified to produce at least one amplificate of a sequence selected from the group consisting of SEQ ID NOs: 23, 24, 51 and 52, and complements thereof, or a fragment thereof, or is not amplified; and
d) determining, based on a presence or absence of, or on a property of said amplificate, the methylation state or level of the gene or a portion thereof.

36. The method of claim 35, wherein method comprises determining the methylation state or level of the gene or a portion thereof and further determining a methylation state or level in at least one gene selected from the group consisting of RASSF2, TFAP2E, SND1, PCDHGC3, EDNRB, STOM, RXFP3, LimK1, GPR73L1, PCDH10, DOCK10 and MRPS21.

37. The method of claim 35, wherein step c) comprises use of at least one method selected from the group consisting of: use of a heat-resistant DNA polymerase as the amplification enzyme; use of a polymerase lacking 5′-3′ exonuclease activity; use of a polymerase chain reaction (PCR); and generation of an amplificate nucleic acid molecule carrying a detectable label.

38. The method of claim 35, wherein determining comprises the use of at least one nucleic acid molecule or peptide nucleic acid molecule comprising in each case a contiguous sequence at least 9 nucleotides in length that is identical to, complementary to, or hybridizes under moderately stringent or stringent conditions to, a sequence selected from the group consisting of SEQ ID NOs: 23, 24, 51 and 52, and complements thereof, and wherein said nucleic acid molecule or peptide nucleic acid molecule suppresses amplification of a nucleic acid to which it is hybridized.

39. The method of claim 35, wherein determining comprises hybridization of at least one nucleic acid molecule or peptide nucleic acid molecule in each case comprising a contiguous sequence at least 9 nucleotides in length that is identical to, complementary to, or hybridizes under moderately stringent or stringent conditions to, a sequence selected from the group consisting of SEQ ID NOs: 23, 24, 51 and 52, and complements thereof.

40. The method of claim 39, wherein at least one such nucleic acid molecule or peptide nucleic acid molecule is bound to a solid phase.

41. The method of claim 39, further comprising extending at least one such nucleic acid molecule by at least one nucleotide base.

42. The method of claim 35, wherein the methylation state or level of the gene or a portion thereof is detected by Methylation-specific PCR (MSP), by an amplification assay using methylation specific blocking probes, or by fluorescence-based real-time PCR.

43. The method of claim 35, wherein step d) comprises sequencing the amplificate.

44. The method of claim 35, wherein the sample is selected from the group consisting of whole blood, blood plasma, blood serum, stool, colonic effluent and colon biopsies.

45. The method of claim 35, wherein the subject has an increased risk of colorectal carcinoma.

46. The method of claim 35, wherein the subject has colorectal carcinoma.

47. A nucleic acid comprising at least 50 contiguous nucleotides of a treated genomic DNA sequence selected from the group consisting of SEQ ID NOs: 23, 24, 51 and 52, and sequences complementary thereto.

The application's sequence listing, which the Patent Office published only in electronic form, follows.

SEQUENCE LISTING (148 sequences)

SEQ ID NO: 1 - DNA, 2519 bp, Homo Sapiens
gatttatgagtgaatgactaaaagtgcagctgagtcctggcagagggcatggggtcccacccagagacaggcagagaaagttgaagtcccaggattggaggccgttcttcctcacctccccaccaggcccaggcagggcttgatctgaacggaggcctgggaacctgtggccagcctttacttgttggaaaagagcagtccttaagctcaattgctccaggttgatgcttccctacttttttttatttatttatttttattattattttttttttattgagacggagtcttactctgttgccaggttggagtgcagtggcgcgatctcggctcactgccacctccgcctgctgagttcaagcctcagcctcctgagtagcctcctgggtagctgggactacaggcgtgcgccaccacgccaggctaattttttgtattttagtatagacggagtttcaccactttggccaggatggtctcgatctcctgacctcgtgatactcccgcctcggtatcccaaagtgccgggattacaggcatgagccacagcgcccggcccctagttctttttaaaaaacgctagatccgtccgctgcgctgagtggaggcggggcaggcctccgttctccaattggccttatccaccgagctcttcccttgtgccgggctctgtgccaagcacatcacacgctgtatcctgcggccaggttgctgtggtccagggtcgtaccctggtccaaggtcgcaaaccgaggtgggactccgatccggcaaccacgcccgtggcccggaaacggcgtcccctgaggcccaggagaggccgggcggtgagcggctgtggagccgagcgcgggcagtgcggatgctgcctatgggggaggcagccaaggacggagggcgagaggcggttcttccaaggtcaccctcttccgggttgcaagcaaaggtcaggggatcccggaatggttagtgcaggagcttctctgtgccttccacgtcctagatcctcagagcctcagaaacggagatcatcgtccccacccccattttacagatgaagaaactgagccgaggaaaggaagcgacttggccaaggtcggagagctcattctttgcagggcggggtttggaacccggggtctggctctcggcaacgcgccctcggcccgcagcctcctgccccctgtgccccgcttcggcccccagcgcagctgcagaggggcccccctcgacgcatacactcaagagcccgaccgcgcggctgaaatcgcggagctcggagccgcggctggctgagcgatcgcggttcctgggctgcgtgcgcgccccttggagctgaaaggagcgccaggatcgggggcgctgcaccgggctgggcccctcaacgctcgcagaccgggccgggctgcagctggagatggcagcaatcccgggaggtctccgggcctcttcagggtgcgtccaggaggcgggttccgtgcgacgcggtgcagcccacccccccccccgagaccgcttaacttcgcgggggcagcctcgggcgctcggagacgcggaggcccagactgcagcctccggatgctggaagcccagactccctggggtcaccggctctcccgccaccccagctgcagagagtcccattgcttcaccgtccggagcttagtctccttgttcctctaccagtccctccctccgcaggtctctggggacttctgaccgcctgttcttactctccccctgcccccatacttcccgcccttgtctcaggaacggtgatacagtcaccggattgctctccatctcctgttagtctacactgcacacaactcaataatccgcgcccttccatccgggtgacagagacacagataatctgagctagtggtgctcaaagtaccggtcccagaacagcagcatcagcatctcttgggaacttgttaaaaatgagaatttgggccgggcgcggtggctcacgcctgtaatcccagcactttgggaggccgaggcgggcggatcacgaggtcaggagatcgagaccatcccggctaaaacggtgaaaccccgtctctactaaaaatacaaaaaattagccgggcatagtggcgggcgcctgtagtcccagctacttgggaggctgaggcaggagaatggcgtgaacccgggaggcggagcttgcagtgagccgagatcccgccactgcactccagcctgggcgacagagcgagactccgtctcaaaaaaaaaaaaaatgcgaatttgggggccccaccccagatctactgaacagaaactctgtggagcccagcagatgattcccatgcacactaaagtttgcgagccactgatctaaacattctttcatccattcattcttcacctggcccacccagcattgccagtgggagagacacccgcaaagcaccaggctgtgagccccaccgccgtgcactctgagacactgtccactagctttgggatggcaggcagaggtactccagcttggtctagtgcagacc

SEQ ID NO: 2 - DNA, 2283 bp, Homo Sapiens
aatgaagacgctggagatcgggcccctgcccgtcccctttctgcgccccgggatgaggcagagactgaacagccggcgagcaaatcaacggcatccagaaagccatgtcggactcggcgcccagcgcccaagcgctaacccgctgaaagtttctcagcgaaatctcagggacgatctggaccccgctgagaggaactgcttttgagtgagatggtcccagaggcctggaggagcggactggtaagcaccgggagggtagtgggagttttgcttctgcttggtgccttgaacaaggcttccacggtcattcactatgagatcccggaggaaagagagaagggtttcgctgtgggcaacgtggtcgcgaaccttggtttggatctcggtagcctctcagcccgcaggttccgggtggtgtctggagctagccgaagattctttgaggtgaaccgggagaccggagagatgtttgtgaacgaccgtctggatcgagaggagctgtgtgggacactgccctcttgcactgtaactctggagttggtagtggagaacccgctggagctgttcagcgtggaagtggtgatccaggacatcaacgacaacaatcctgctttccctacccaggaaatgaaattggagattagcgaggccgtggctccggggacgcgctttccgctcgagagcgcgcacgatcccgatgtgggaagcaactctttacaaacctatgagctgagccgaaatgaatactttgcgcttcgcgtgcagacgcgggaggacagcaccaagtacgcggagctggtgttggagcgcgccctggaccgagaacgggagcctagtctccagttagtgctgacggcgttggacggagggaccccagctctctccgccagcctgcctattcacatcaaggtgctggacgcgaatgacaatgcgcctgtcttcaaccagtccttgtaccgggcgcgcgtcctggaggatgcaccctccggcacgcgcgtggtacaagtccttgcaacggatctggatgaaggccccaacggtgaaattatttactccttcggcagccacaaccgcgccggcgtgcggcaactattcgccttagaccttgtaaccgggatgctgacaatcaagggtcggctggacttcgaggacaccaaactccatgagatttacatccaggccaaagacaagggcgccaatcccgaaggagcacattgcaaagtgttggtggaggttgtggatgtgaatgacaacgccccggagatcacagtcacctccgtgtacagcccagtacccgaggatgcccctctggggactgtcatcgctttgctcagtgtgactgacctggatgctggcgagaacgggctggtgacctgcgaagttccaccgggtctccctttcagccttacttcttccctcaagaattacttcactttgaaaaccagtgcagacctggatcgggagactgtgccagaatacaacctcagcatcaccgcccgagacgccggaaccccttccctctcagcccttacaatagtgcgtgttcaagtgtccgacatcaatgacaaccctccacaatcttctcaatcttcctacgacgtttacattgaagaaaacaacctccccggggctccaatactaaacctaagtgtctgggaccccgacgccccgcagaatgctcggctttctttctttctcttggagcaaggagctgaaaccgggctagtgggtcgctatttcacaataaatcgtgacaatggcatagtgtcatccttagtgcccctagactatgaggatcggcgggaatttgaattaacagctcatatcagcgatgggggcaccccggtcctagccaccaacatcagcgtgaacatatttgtcactgatcgcaatgacaatgccccccaggtcctatatcctcggccaggtgggagctcggtggagatgctgcctcgaggtacctcagctggccacctagtgtcacgggtggtaggctgggacgcggatgcagggcacaatgcctggctctcctacagtctcttgggatcccctaaccagagcctttttgccatagggctgcacactggtcaaatcagtactgcccgtccagtccaagacacagattcacccaggcagactctcacggtcttgatcaaagacaatggggagccttcgctctccaccactgctaccctcactgtgtcagtaaccgaggactctcctgaagcccgagccgagttcccctctggctctgccccccgggagcagaaaaaaaatctcacc

SEQ ID NO: 3 - DNA, 2236 bp, Homo Sapiens
caggtgccaacgaccgcgccagactggcgttggaacccttgggccataaggtcttagtgggtggcgtcattatctctgcggtttgcaaaagcggagtggccctgtcaggcgggaagcctctctcctctccccagatccgcgacaggccgcaggcaagaaccagcgcaaccagggcgcgtccgcacagacttggaggcggctgcatgctgctacctgctccagaaggcgtccggtggccgctccgcagtttcagagcctagagacaagcagaggaaggaagacaggacacttgggtcagctgcccgagccaagtcgctgcaaacgctaataccgcccgcagcctcttcgccagtatccacgctcaaaagtaactcaagtttgcgcgccagtgggaaacttggcgctcatgactcgccagcgcgggtcgaaactccttcctgatgccctctcagctgtttttcttcccccgcgtggccaggaggggtaaataatatgcagtggggcggggcgttctggaaggggtgtgccagggagggaatgatgggggtcccaggcaaagctccgaactctttcacgtaacgggaggaatacagacacgtcttagttaagcgtgcgtgggaaccgcggaattaaggcacctagaggccaagggcttgtgtcaagctctgcattttgccccgcaggggaacctctataccccgcgattgaactcgaaagactcctcccggcggatgaaagccgctactccctggctggctgagctacagctcccgcagcgcgcccaggagtgcgccggagattcggaaacccgcagagacttctcaagtcagcaggaacttggaaaccgctgttccctccaaacggcttcaaacactcgcgctccttcctttacccaacctaattttaatttgccctctctataggcttaatttttatttttttaaaatcccaaactagtaagccaaaccgaagccccagaataaggttcaatcaatgattttaattcaacaccaagcccgaatgtttacctctcggatctgacaaaccagatgcagagcgacgaatggagaccaccttcccgggaggcggaacccagctgggttccagcctgctctgggagaggagcacgcctcccttgagctgcaggcgggtccggctctgacgaaacgctgcgagaatgccagacagtgtagcctccaccgtttgctcggggtctctgctgccatcagacaagtacttttattcattcatcccttcccatcaatcaccgccagactcctcccgcgccttccgaccccgctgcaacctttccccttgggcgatgcctggacagcatcagtagtagttgcccgagggaggggggcagtcctcgtccggggacaggtcccaaaaggctgtttatttgttagagttctacgctcttcaaatgaacccaaatcaagggcaagttatcacgcaccatgtgacacccggcagctccagactagaacaaggctctgcactgaacgtgataattgaacttttaatgccaagtgtcacttttctttcaggtaaatgttccgccgctgtgatatttaaggttggtttgtgggcgctgctctttgctctgcttcattttgccctgaagtttcatttcaagccaacattaaccccaacacggaacagctcgatcttttcttcccaggccctctcactgccccgagagaggattacaagtactcctcattttccccagtacagctcttctcctctcttcctgccacagtatcggtgttaggcaatctcaggcatttttatactgtacctatgacagacttgatgcttatcggagacatgaaaataatcagaaagctgccatgcaaattcaacatgatatttatttaccaggtagagcaatacaataaggtctttctatccattcttgagctccatgtttaccgcagagaggaaaataacagcgactggtagttttgcccagagattgtataaaagaggtcaggaagtcaggcttggagatgcactggagagtactgtgccgtcctccaatcagcaaaatccctactggatctgtggaacttcaaacccagaagcacccattccatgtagcagtttcacccagagacaggaggctcgttttttgcttcatgttagttaatggaatagatgggacaagaaccttggatttttggctcttaggcaatgctttctgggacagtggaagtagaaaatcaatttc

SEQ ID NO: 4 - DNA, 2204 bp, Homo Sapiens
tccttctgcaaatcggtctaagtttcgggaggtgggattgggggaggagggggttcaccctggggccaggccagggctgggtggaggaggcggccttcgagagagtgagtcgggaaagaaggggagtgggcaaagggtgagatgtggggtcccggtccccgcctcgctggctgccagttccctctgcgtttcctagtccgcgtgcgtgacacgagatagtgcagccctggcatggggcttggcatctggcggccgcgagataaccagggcccgtgcgatgggaaacgtgccgttggcagcccgccacccctccatcgtgacctcagtctgccaaacagggttcgtgatgctcagtttactagggaggagccgcggctttgagatctcgcccagcccgaagcagcggagactggccaggagcccggctgtcagacctcggagcgcacgctgcgggcgggggctcggtccacgggggagggtcaggggacgcgggactcacccttgaaggagtcggggagccgctgggcttcggagtcccgtgtgtgccgcttctcggccatgctgcccgagacgcagtcgcactcccccgtcctcgttgccaaacccggagccgccgggaatgccctgaggagccagaggcacaagacccagattgccgccccgcccccaatcgaggtcccgccctcgtgagagttggccaatcaacgcccaggatcgaggaggacccacctcccaatccccgccctcctgtccctccacggcgcgactgcttcgcagtcacttcccgctagttctgtgggctgaggggcgtggcctgaggggcgtggcctgaggggcgagagcccccaaggctgtgggtatgaggccggggccctgcaccggaagggagggcggaagccacgggacgtggagcagatggtgaggatagtggggaggtagcagcagaggatgacccgaggcaaaagtgcaagtgaagaaaagtcgccttgccgggcagaggtacgggaccaaggcgcctcctctgggctgaggagttagagggaagaaaatggcgccctgtcatgagggcgcgaggtccgagttgaggggagaagactgagggacacagaagtggccgaagtgagggcgctgaggtcagcctgagctgagagggccggcagatcacgccgcagccgaagtgaacgaactcgagtgaggtgtgttaagaaaatcaaaatgtataaatttggaaaaggagaggaggccgggcgcggtggctcacgcctgtaatcccagcacgttggaaggccgaggcgggtagatcatctgaggttagaagttcgagaccagcttggccaacatggtgaaaccccgtctctgctaaaaatacaaaaattagccgggcgtgtggcgcgcgcctgtaatcccagctacttgggaggctgaggcaggagaatcgcttgaacttgggaggcagaggttgcagtgagccgagatggcctgggtgacagagcgagactccgtctcaaaaaaacaaaacaaaaaacaaaaaaacaggagaggagactttatttcttgtaaggggttacagcctgcaaggtggccattccgcaggctggagaatggccaggaccagagacaggcatttcgttggaggaggggttggagtagcggctttatgctgaacagcttgggtagacatgcatattcagcaggtgacaggaggagctatgaatattcatgagggtggtcctgacgcatgcccattgagcaaacatgcatgtaacatacaacccatgttcattttggagtgaagagttaccaattaaatgttaaatgcctggcctgcatggtgacgtccccatctctacaaaaagtaaaaaaaaaatagccaggtggggtggtgtgtgcttgcggtcccaactagtcaggaggctggggcaggaggatcacttgagcccaagagttggaggctgcagtgatgtatgatcagatcactgcactccagcctgatggactctaaaaaataataacaatacatgtattacagttagaccccatgcgtcaaaaggtcttttcaggacaggaaggtgtgcaagtatgcagtctgtgtaaactagccagagccagtccatggtcggtagttttcctatgaggagaaagttactgaaatcagcctcttgtccaattaaagctgtaatgatggctggtggaataggggttcc

SEQ ID NO: 5 - DNA, 2137 bp, Homo Sapiens
tctcattagttagtacctaattatttaaaagtgtggtttatgcttggaactgggctataaagatggcaatgtgccaaatcagacatctgcttcctgtacactcctataaattatatcagcttattttacaactttgtccctgtcagttataaagaagaaagtttaacattctagacgcccacacctcatcaaactgtgggtgaagagtcagtgagcggcaaaaggtggccgctttgagttgtggtgatggaattttcagggaatagtcaggagcttggaaagtcactcctgagctggtccattcaagcattcgggatagaagtggtcagtagaaattcctcatggaatctcaaaacaccactaggacagtagctccacgacacttttaaaacctggagtttaaaaaataatgaagtataatttatttagaacttaagcatcaagggaaaacgttaagttctgcttcacttcaaagacttttccctgaggaaaacatgccactgtttttcagatgtgaatgaaatgatactttttcccccgacatagtttccttgcttacgactccacactgttctccttcaatccctttcaccactgaaacattacatgcaagatttgctggcatgccccttgacttttcatgcttaaggggaaaaatgtttgtagctgatgtttgagtcccaggagctcggtgaagaaaaaaaaaaaaagcaacgcaaggaaaattgctctaatggtatatccttcctaaagcttgaagtttcataggtaaaaggagggataaacattccttcctgaaagcaaacagtcaaggctttttcccactcaactatccctgaaccttttgtaatttccccgaggcctaaacccagggcacaattaattccagaccctattttaaatctaatccgtctcctatttgcaacctgcctgcaggtgggtcttttctttctaaattataaatctgaacctgcgtcaacctcttacaacacaaggcatttaaagcttcctggagccactgacctggtgacgctgtagtgcacgtctgcatttgaaagtaagcaagagaacagaaagcgagcaagagaaccgcaacctttaccaccttggcgaattcttgccgggacctacatattaaacagcacttgcacacagacgcctcaagtcgtcctctttagagtcgtcacttagacctgcaaggggcgggggaccagtggaaacccaaacagaaactttcaccattacaaaggcgagtccccattgattatggtaattgttttgctcaggttgtacgggtatggccaattttgtttgaaagctcgctctttctctgcgctttcctgtcgagttcccttcaggttctggtttcctccgacggtggcaagggatgtttttcacgcctttcaccacttttgcccgcgcctgcgtcccctgcccgaggtcccaggccgcggcggcggcgcggtgggttcattagcgggcgcgccgggcccgcgcagcgctgtctgcagccgcgtcgccgcatccatcatcattacatcagcgcggggaagtccacgccgagttctcccggccccggcgcgccccagtcagcgcgccagcaaacagaacatgctggattgctcagagacggctctgggtgtctgggggcagaaggggtgctcccaggcccggctttgatccgcatttctgaagctggctttgggagacaatgcatctccgccagccaggccgcgggaaaagtgaaaaaagggctgggggccatgtgggggtggggaggtgagctccagcgccagcagcgcctggcagtctccctccagtgcagagaagcggtctgtatcaaggcgtatcagagtggtcaccctgctcctcggaatattcacgggcatttgcaaactctacagttggcccagccaaatttccagcaaacactggcaagggccggccctggttgcgttcagagggctcttttaactggctgaattcagggagctgcaaccttccaggtactttgcaatgcaaccaccctgagtgtcgcattataataaaacattggggatcccttgaaaagccttcacaaaaccaataggtgtgtgcttcgctcacaaaacgtcgaattcaccttctatgaacctgg

SEQ ID NO: 6 - DNA, 2461 bp, Homo Sapiens
tttttttcttttttcctttttctctttcttttcttttctttctttctttctttctttctttctttctttctttctttctttttcgtttttctctttctttctttttctgtttcttatctcctcagcttgaaggttgcatcctctttatctccttaagtaaagctgggagttctgtagtactccaggagtgaggacaattatgcttaagaaactttggtttcagtttagtcccagaccaagaggaaaacatttcaaaattttaaagtaaatcctaaaagtgtaatttacaccagagcgattgacctggcatttatgtagactgaagcttgagaagtaattcaagtggtttccactcattcccttggaagagtccttagaatgtacttccattggtctgaaaaacgcctgaaaaagagtcctgatgctaacagtaatggaaataggagggctggtggttcacgatcagcccagtggtatcctctattctatttgcatctaggtaaagagactgtggcctgtatgtgatcaaacaatttgttgaagcgctttgggcttagggcatttaatttctgtgaagtaggaccatcagttgtttgctctgtttttgtgtcacctctcagaatacattaaagtaggggcaacccttgagcccagacttctgccatgtgaagaccctttgaaaatcctgacaaacacaggtactgcgtaagtggtcagctaattaaagaggggaggtggagctgtcctttgtgtatccaataagtacccattatctcatttgagcatgaaaagaggccactgttattactttcaagaaggaaagtaagcaggatagctcatatttttagaacaattcctcaccaaatggaataattccggtgaaaagtgggagtgaggaagaaagaaaaaaaaaacttctaatcataatgtttgggaataagaaaggaagaagaaactcacgtcaaagccgactttctcctgcagctgtaaaataaactcttaagacccttcctgctgaaactctggagaggaaaactggagtggcgggtgggctttgcctgcagctcaactctccctcgcggcgcgggcgcggctgggttcagcacctcggaaagcgcccctcgcggcgccccgggattacgcatgctccttggggcccgccgccttggccgtgcaagtgccaccgtaactggtgagagccgctggcaacccacccggagttgacaaccgcggagagacgcagacacccactgacctccaggaagctgagcgtggtggatggaactctacgatctctttctctccaaggacggaaacctcatccaagcagtcccagaggaaacggataaaggtatttgaaagggagcgagcggccccaaatcgcacaattgagcggctgggggagttatgcgccagtgccccagtgaccgcgggacacggagaggggaagtctgcgttgtacataaggacctagggactccgagcttggcctgagaacccttggacgccgagtgcttgccttacgggctgcactcctcaactctgctccaaagcagccgctgagctcaactcctgcgtccagggcgttcgctgcgcgccaggacgcgcttagtacccagttcctgggctctctcttcagtagctgctttgaaagctcccacgcacgtcccgcaggctagcctggcaacaaaactggggtaaaccgtgttatcttaggtcttgtcccccagaacatgacctagaggtacctgcgcatgcagatggccgatgcagccacgatagccaccatgaataaggcagcaggcggggacaagctagcagaactcttcagtctggtcccggaccttctggaggcggccaacacgagtggtaacgcgtcgctgcagcttccggacttgtggtgggagctggggctggagttgccggacggcgcgccgccaggacatcccccgggcagcggcggggcagagagcgcggacacagaggcccgggtgcggattctcatcagcgtggtgtactgggtggtgtgcgccctggggttggcgggcaacctgctggttctctacctgatgaagagcatgcagggctggcgcaagtcctctatcaacctcttcgtcaccaacctggcgctgacggactttcagtttgtgctcaccctgcccttctgggcggtggagaacgctcttgacttcaaatggcccttcggcaaggccatgtgtaagatcgtgtccatggtgacgtccatgaacatgtacgccagcgtgttcttcctcactgccatgagtgtgacgcgctaccattcggtggcctcggctctgaagagccaccggacccgaggacacggccggggcgactgctgcggccggagcctgggggacagctgctgcttctcggccaaggcgctgtgtgtgtggatctgggctttggccgcgctggcctcgctgcccagtgccattttctc

SEQ ID NO: 7 - DNA, 1920 bp, Homo Sapiens
ccaggctgccgtagacacagcctttgctctcccgaaaaacacgttctaggcgccgggattccagatacctgggaaatagagtgcacgcagctgttgagaggcctcgcgcttggcttctcctatcactgaggcgcagaggtgctgtggacagcccagacccacacggcgcccgaggtgaaacagaaccctcagtctccctatgaggccactggcactctcggctgtccccagagctctccgacttagagctgaatgcaaagtaagcgctcgaaatgcagaagtagccggggccgcccacggcacctgcctcgctcggggcgagagaagacgccaggctgaggtcccagcgacctcaggcaccagctccgaaggagggcggggagaccgcaaaggggaagtgcccggagggccaacggcccccgcgcaccctgcgcccctctgaagcgcgccgcctccccgcgccggggactgggacctgcctctggggaatccgcctagaagacggcggcggactggggtcgggcactctccagggctgtcaggccctccccagccctgcacctgccgcgccgccccacctcgccaggaagtctcagagaccccggggatggggtgggagcgccttcccatcgcgggctcaaaaagaaggaaggacgcccccaggggtcgtagaaggaggactagctccaagccacaactttcttcggacccaaggcaggccggctggggctccgcgcctacacggcccctggcgggggtccgcgcgccccgggagccccgcggctcggggaggaaagaggagacaagagacaggcgaggattacggggctgacccagccggggtagggaccatcgtggaaaaactttggcgaggtggggggacgcggaaagagagcggcccgcgccctgcaccttgcgccgggcatcccgcgccagtgcctcgctcccagtgccccgcgccccgcgccccgcgccttgccttcaccccgggccagctgcatcgcgcccgcgccgcaggaaccgtggagttggaaagtgggggcgccgcggctggggggctgcttcagctgcgcctcggccagcgatcggcgggccgggctcaaatccagccaggctgggcaggcggtggccgcgcgactggggaccgggcgccccgccctcctcgctcccctcctccttcctctccctccctccagccccttggcctttttcagcccctaccggatctgctcgtccgctgtcctctcttttctctcgctcttcatatcactctccaccccttcgccttgccttcgcctttcttcctccccttgtctcctgccccctcctcttctcccctcccctctaggggcggagcttctcccctccctcccagacaatgctgtggctgcgtccccttccccgccagctcgtccaggctcccgccgccagcgattcttccgggctgggggtggggaggtggggggggagtgcagggttggggaggatgagctggctcccctcacctccttgctgctgccctctccaagagggatggagacttggcccaagctcctcggttcacccggagctgtgacagccactcccagggaacagtcacgctgccctaccaagcccacctccagcggcctggattccccaggcagaggttgtgggattttgttttttctaacatcccagcttattcccaaaagggtttgagccggacaggggctaaacaggccccttcgacttggcgggccggccagacgtgacagcaatgccaaggaggccaagtttctttgtccatttctcacctcccccttttccatccctggacctcctggcgcccccagtacacagaggcccttgagcagcccggctgcaggttccctatctactcagagttctccccctcacgtgcctatccccaaccctgca

SEQ ID NO: 8 - DNA, 2225 bp, Homo Sapiens
atcttcctgtaaaccaaattcctgctgcccagtccagtgcctggtgcatagtgggggctagacagacatctgttgagtgcatgaccagggcgctgtaggtggaggaggtggtggtggggtgggggaggggaattcccctgctgctccccgttctgtgggaaccagctccagaaagaaatcctctgccgcccttcccaccctactccaactttggatctgctctctgacctccttcacttggccctagttctccacccagagtcaaccctgcctgaaaggcaccatgtcctgtcaccaaggtctcaaaatagggaaaatagtctctgaagccctcagcccgcaggagatagggcaccccagggtacaaggcttcaccgaggggctggaaaaagagcccagatcccaacacctatagaaaggggccctggctgtccagctgtgagtggccttcccctcgcctctcagcacacctggaaacgactccacatgtgggcgccgcgggatgctgggtagcaaggagatgacccagctgaacaatgcatttggtccactcctgcgaggggaggagaacgccgagggacaggaactgcgcgccagcaaaagacaccctaacctggggtgcgcccgccagctgctttcccaaggtgaaaacctccaagaggcgagatgcaaatcccagtggcgtccacacccggaggtgtcttctctccaggtcgcccctccgtctcatgcgacaccccaatccccgcagcctctgctcagcgtgggaccaagaatggggagtcctacccctcctcggctttccagccccctaacccaagacaagagggcgcgcgcccgggctgggacaggtcccagccgcattttcgtagattgcactccccgcccgggagcgacccgttccagcagcccccttcccgccccatcaacgcggccgcactgtcggcgtctagaggcgacatcctggcaaagacaggaatcaagtcagaaattcaggctctagaagcaaaggctgcggtgcctcctggctggaagaaaacggcgggtgggtggaggatgcggtgcgcgggaatttccccacggacgcttgctgtttcctgctcacctttcaggaaggtgcccctctacctgcaccctcccctgcaatttggagctcgtccgcgagctcagctacccgctggctccctctgcccgcgcccgcacaccacagactccgcttaccgtaccctacccggtcctagagggcccagaggggatctcctgaaaccaactcgcctgcttggagccagccccgacgcatatctcgagagtggcgggaggcaaagcagccggaatgcccgagaaaaaagtgggcgtcagaggcccttgtcctagcgactcccccaccgcaccgactgagtcccgggactgcagggatctaagcccttacctgtctcggcgcctcctttctgtgcgctctgctgctccggaagccggatcgagagtcacagtgtggttgggcgcaggcgggccgctcggttttcacctcgaggacccggacttgcacttgcagagccgctgcgtgggggatgtccctcttttttcctcgccccggcgggctcctccggcgtgtcagggtctctgggttccagctggagttggcgctccggccccacagctctttccagcgtctcggacctgtgcgccccgccccgcgctggactccgccccggggtccccgcctgcctcctagtccaggccaagggtggatgcccagctcccccaccccaccgcgtgctctcgggctggtgcgtccagggcgcgggcaccgtagctccggccgcgctgacgcgagtccccggcagcgggggcagcctctcgcacggatttcagcgccttcgcatcccgtctgaatcggaccacacagtagccgggtttctaccgtgcgcttgggaacagtgagcaccgccctctgccgccagtcgtggcaccgcacccgggtcgcgcgcgcaggaggggagagtcctgtcttccggaggtgcccagtgccagcgtccgcgcccactagaaggtgaccctttcaaggaaagcccggctccgacgagtgcggtgtgggcctttggagatggcggtgaaggaggaggcccccaggaggaagctggggatggggacagtttgctctgctcaaagcccctgaagtcctcacccaaactttgcgatgaccaccactatcagattccatggcc

SEQ ID NO: 9 - DNA, 2251 bp, Homo Sapiens
cttttcagcgtgactgaccgcgactcagaggagaatgggcaggtgcagtgcgagctactgggagacgtgcctttccgcctcaagtcttcctttaagaattactacaccatcgttaccgaagcccccctggaccgagaggcgggggactcctacaccctgactgtagtggctcgggaccggggcgagcctgcgctctccaccagtaagtcgatccaggtacaagtgtcggatgtgaacgacaacgcgccgcgtttcagccagccggtctacgacgtgtatgtgactgaaaacaacgtgcctggcgcctacatctacgcggtgagcgccaccgaccgggatgagggcgccaacgcccagcttgcctactctatcctcgagtgccagatccagggcatgagcgtcttcacctacgtttctatcaactctgagaacggctacttgtacgccctgcgctccttcgactatgagcagctgaaggacttcagttttcaggtggaagcccgggacgctggcagcccccaggcgctggctggtaacgccactgtcaacatcctcatagtggatcaaaatgacaacgcccctgccatcgtggcgcctctaccagggcgcaacgggactccagcgcgtgaggtgctgccccgctcggcggagccgggttacctgctcacccgcgtggccgccgtggacgcggacgacggcgagaacgcccggctcacttacagcatcgtgcgtggcaacgaaatgaacctctttcgcatggactggcgcaccggggagctgcgcacagcacgccgagtcccggccaagcgcgacccccagcggccttatgagctggtgatcgaggtgcgcgaccatgggcagccgcccctttcctccaccgccaccctggtggttcagctggtggatggcgccgtggagccccagggcgggggcgggagcggaggcggagggtcaggagagcaccagcgccccagtcgctctggcggcggggaaacctcgctagacctcaccctcatcctcatcatcgcgttgggctcggtgtccttcatcttcctgctggccatgatcgtgctggccgtgcgttgccaaaaagagaagaagctcaacatctatacttgtctggccagcgattgctgcctctgctgctgctgctgcggtggcggaggttcgacctgctgtggccgccaagcccgggcgcgcaagaagaaactcagcaagtcagacatcatgctggtgcagagctccaatgtacccagtaacccggcccaggtgccgatagaggagtccgggggctttggctcccaccaccacaaccagaattactgctatcaggtatgcctgacccctgagtccgccaagaccgacctgatgtttcttaagccctgcagcccttcgcggagtacggacactgagcacaacccctgcggggccatcgtcaccggttacaccgaccagcagcctgatatcatctccaacggaagcattttgtccaacgaggtaaggctgaagcgaaaggaccaccatctctcatctcctccatcagaaagcctcctctagcccggcccttgtatctctggtgcactgtatctatttttaggatattagcttatgtgtatcgttgtgggagcagagatgggcggtcaccttctcccactccttcgtgtgtaacctaactttcgcgttgttccaccctttcacatttattttcattccgtccccttggtactttgccaccttggagctccctcctttgctcttccatcctgtcagtcctttcccttctcagtaacctgggcatgaagggaaactgcgtgaagggagagggaaatgtggaggagggacttactttctagcactggcaaaggtcttttttctttgcgtctgtcccaggcattaataaagttggctctattttgctttgtttaacgatgcttttagtcgcgtgtacaagtaagctatagattgtttaactttacacagttgtctaacctcgaattcatgttttagtgaacaagttaccagatccttctcctctgaactcgggttgcaaaaaaagccttcagttcggctctggacagcatttacagacgctcttgaagccgagcgcccacacagtgtgaatttgaatgaagctgcgttggcacaaacccctgttaagagtaaactaacgaaaggcttaaacaattgttgtcttaaatatatctttttagctaataatcaccttcttgccactgttttggataaatcacgc

SEQ ID NO: 10 - DNA, 2553 bp, Homo Sapiens
ctggccacccctgccctcccttagacctccagagcccccagtgtagccacagaggatgctgttggcttcagccccaagaagacgccgcttcctccagagggctaagtaagtgggaatccccctccctacttgtcctgggctccaggcagggcccctggtgtaaggcctggggctggaagccgacccacctaggtccaggctctggggcagaactgaaactccttggttactgtcggctgcagcctgggagcaggccactgccaaagctgtgggtccttccaggacagtctccccatgaggccggtcctccacctgctgtttcttcacacctggtggccagggatgtggccctgggtagaacgatgattctccactcctgtcattatggaagccaccgctgtctcccagcccagccagccacctgggctgcagagcacccctttcatgccctccgggtgcctcccccttctcctgccccagcctggctttgtcctaccctgctctcagggaggggtaccctggagtggggccagggcatggctctcccccgagggagttcctctctggctgtccccagggcagctctgcacagcctcagtacctggcgcacctcccttgacatccttcttagggacagtcaggcactctgtgtggggcactcaagagagccaggcccgtcagcctctagctcctgccagaatgcaggcctgaggggtgaggggcggggcaggggcagggacaggaactccggcgtgctctccatccgcaaaggttcactgaggccccgagccccagccactgagccaccaagtcagcctgggccaggcctgggtgccctgtctgcaatggaggcagagacggggtctcggggcagttctgaggatgctgggtgcacagcgggggcctcgccggcaggaatcacttatgctctctcctgggccaagctttgtggatgcccagcctggggccgcggggagctggcaggtcagtggcagacactggtgggcagacctagtgtctggtagaacaggcatcaaggaagtggtgaccggagggaagccaagtgcactcaaaccctcgggtgagtcatcaccgccgggtctttcacagctgctgaaagtgagcaacagtgatgaaggtttgtgagtttctgcgtgagcgagtgaatggaccagtagcagtttccaggttgtggaagagcgttccctccccgggatggggacacttggttacagcaattcctaatcccccacccacccaccgcccactgcagaggtatgcgggggccctgcttcctgcaggcaggagtgaggggcactcctgtgatgtggcacccctgtgaccgaggtcatgtgtgatcggtgtaagggcaggaagcgagtcattggtctgcaccaggcgtgggggcttctgcgagggcaggacccaaagtcggcctggcctcccggctgcagcactcctttccctttcgaattaggttagagccctgggacgggaggtgccctgtagaccacccccctcaccaacttccgtcctccgccccacccccgcggtgatccggtgaactgccggccccctgctgtgcaccgagtggggcagtgaccctgacgtggcgtctcctgccgcccctgccaccgccaccacctccggtggcccagcctccgcattccccacccccatggaggaatgcaccaggcctcccttcctggatgcacccctcacccacatgcttccaaaccctggcattttctgctccccctttactcccaccccttcccctaggctcccagacaaaggggaagtggctggatcctcttaaagggacagtgtcccaccagcttactgctgaactcccctcctcaaccccagttccctagttacagttaattagcattagcagacagcccatgagtgatacccatgcaggccccaggctgtggagagtttcctgggtaggaaacagcccttaaggtccctcatctcatccaggtcccagtctttcctacctgcctctctcctagattgtggccctttggagcctggttcttctgtccctgtgtgaccgacacatagcacccaaacagtggcagagcgggacggaccccctagcctgttctctgtgtgggtctgtaccctgacccagacatgcccccccacagcaggacccaggggggcacatgtgtgcctgcgggttcactggggcacccgcatttggtttattttattttttagagagagggtcttgctgtgtcacccagctggagtgcagtggtgtaatcatagcacactgcagccttcaactcctgggctcaagcgatcctccctccccagcctccctagtagctgggagtacaggacccactgtatcctggctaattttttaataattttttaagagatggggtcttactgtgttgcccaggctggcctcaaacctctggcctcaagtgatcctcccaccttcgcctcctgaagtgctgagattacaggcatgagccaccatgcccatcccagactgacatttctatatttgttcatcctggctgggcaggg

SEQ ID NO: 11 - DNA, 2001 bp, Homo Sapiens
ggcaaaagcctgcctggacttcctggccaccagaaatatgagcatggtggtggtccccagttccctattcatgcttgggctcaagagactgggagtctaggttcactgactccctgagaaagactaagaccctgcattttagaaagaggtttggggatctctgccctgcgcaagggtagaaggatcagctgttcctctgagcaccttaacccggaaccccggtccgaagccgagacaggagactggatgcgaggccctcccagagctggtttctctcaaacaacttccaaaactcctagatcctaggggtacgccgaaatcccccaaagcagtccaaagaacacaacgagagtcctaacatcccaggtggcggcgcgctggctccctggagcggggcgggacgcggccgcgcggactcacgtgcacaaccgcgcgggacggggccacgcggactcacgtgcacaaccgcgggaccccagcgccagcgggaccccagcgccagcgggaccccagcgccagcgggaccccagcgccagcgggaccccagcgccagcgggaccccagcgccagcgggaccccagcgccagcgggtctgtggcccagtggagcgagtggagcgctggcgacctgagcggagactgcgccctggacgccccagcctagacgtcaagttacagcccgcgcagcagcagcaaaggggaaggggcaggagccgggcacagttggatccggaggtcgtgacccaggggaaagcgtgggcggtcgacccagggcagctgcggcggcgaggcaggtgggctccttgctccctggagccgcccctccccacacctgccctcggcgcccccagcagttttcaccttggccctccgcggtcactgcgggattcggcgttgccgccagcccagtggggagtgaattagcgccctccttcgtcctcggcccttccgacggcacgaggaactcctgtcctgccccacagaccttcggcctccgccgagtgcggtactggagcctgccccgccagggccctggaatcagagaaagtcgctctttggccacctgaagcgtcggatccctacagtgcctcccagcctgggcgggagcggcggctgcgtcgctgaaggttggggtccttggtgcgaaagggaggcagctgcagcctcagccccaccccagaagcggccttcgcatcgctgcggtgggcgttctcgggcttcgacttcgccagcgccgcggggcagaggcacctggagctcgcagggcccagacctgggttggaaaagcttcgctgactgcaggcaagcgtccgggaggggcggccaggcgaagccccggcgctttaccacacacttccgggtcccatgccagttgcatccgcggtattgggcaggaaatggcagggctgaggccgaccctaggagtataagggagccctccatttcctgcccacatttgtcacctccagttttgcaacctatcccagacacacagaaagcaagcaggactggtggggagacggagcttaacaggaatattttccagcagtgagcaggggctgtatgggacgcgggaggagctcagaggaggcgcggagagtgcccgaggttgggtgagtgcctagaggggagatagttgaaccgggttcaagaggtgcttagtgggtgtttgttgaatgaatgagtgatgggctttgaagtctgagtgcattgaaagagggggtgtgtaaaaagggctcctttcatcacacaggacacagcatatgcaaatcctctccctgtggaaaagccagacaggttaaaaaggttacaaacaaattagccgggcatggtggtgcgcgtctgtagtcccagctactagggaggctgagccaggggaatcgcttgaacccgggaggcggagattgcagtgagccaagatcgcgccactgcactccagcctggaaacagagcgagactccgtctcggaaaaaaaaaaaaaaagttacaaaccgtgtgtggg

SEQ ID NO: 12 - DNA, 219909 bp, Homo Sapiens
cgttacccgagttgtaaagggcggctccctgtgtctgccccgctgcaccgatacaccgagctgcgcacggtgcccagcgcagggagaacaaatgatcatctgtccaacgcgcccatttacaggtgaggaaactaaggctccaactcaatcgacgcactctgcccttttgattaccagaaaagtagcaggacaggtgtcctgtcccgccctaccccggcccactaagccggcaccccggctccgacccccggctgtgcccggcgccgccgcggtgcccggcgccgccgcctcgcccggcggggccgcccggagcgcccgcacctccgcccgcttccacctggccgggcccgccccgcccggactcgggactgggaagtgcggcgactcccggaaccagccattggcgccagcgcggggagctgggggtgcagagctgcgggcgcggcgggccacgcaggcggcccccacccccggcctggcctggtctggtctggtctgcgctgccgcgcgggggcgccccctcccaggcccggcgcccgccagccccgctccgccaggtgcagcgcagcgcaggggtgggcgggggtggggctcggcgcgcacgttcacggggcggggagggggcgggtcaggggcgggaccacagccggctgggccggggttctatgcgcatctccggggaggggcggggcgggggcggggccggggcggggcccggtcggtgcactccagacggcgggccgccccctcttcccgccttcctactaccggcccaggattagcgccctgggagcgcgcgccccgctgcctcgccgccacactttcctgggagcggcggccacggaggcaccatgaagaagtcttactcaggtgggcttcgcgcccggggtggggaggggtcggtgtcccgggaccagcgctgctcacctgagtgcctgcggccgggagtggcgaggcgcccccggagctgagcgagtccccgcggcgggcacactgcaggtcgagttcctcccaggacagggccgctgtcgggccgctttcgacctgagccgaccgtcccctgcgctgtctccagcccttgctcgagtgtcggaggggctgccctgggggacgctccctcttcctcgccccttgcaccctcgcaggaatcgctgactttccaggtcggccgggtgctttgggtccctgtgcgtctgtgtgggtgaatggggtcggggctaggtggaggggtgtccttgggttcagcctctagggctggtggtccaggccgcagcatcctttcttcggattctcttcggtttctcctctacttagtggggcacgggacggcctccagatgggaccgtccagcagcgcccaaacttggcgactcgggttcacgttttgcgctcaggacgccgcccgcggctgacatcctcactccaccctagcagggcccgccttaagtaggcgaagggggcctgacttgggcctcaccatgagccggttcaggagctttcatttcataagaggctcccgctctggcactctgaagttccatttcacagatgggcacaccgaggccacaagggcaggttaagagaaatccagatcttcattatttgtcttttccttccttttttttttcctttgtggttttctccaaaggatccaggcaggcaggatcctttgtcctcctcagtcctcaaattataaatagcgtctcctcttctaaatctagaaaccgtttgtttaatgtccctcctttaattcattcagatagaaaggtacctgccaaggatccatgaattaatttttattgataggagaacagaatcatgggccttagttggaggtgaaggagtcatcggggccatccccctgcctttgggccattgtcggtttcctctggctttccatatttaggaaccaaaatgagtgataaagtaccttgtctcaaagaggattactcagaacttccccgaaaatacccttctgggtcagtagcttagaatttcaactttcacccggttgttgcgaacaagatggccctctacgcacccggagcacagctctgtcaggagcgtgggtgggttggtgtgctggtgggcgggagcgggcttccaggtggcacatgcttggttttggcaccggggcttcctccccaacatgctccaaatacttgagattgttgtggggatcgcgcggtgcatggccctttccaggggatctctagcccgcccagggagggccctttgcccttggtttcttacactttacctcccactggtgggtccagacagtgggggtgaccggggtcctcccaggtcgtgggtcctgggttttttctgcggagaccctcctgcacagatgccggaagggccctgaggcaggcttggagtctctgcacctgcggcttactgggaggtggggagaccatcacttgtccttttctcctctcctccacacacacctaccccacccctcactgggtttcttttttttttttttttttaaaaaaaaggacagaaccttttgcagtaggtggaagtagagtttgtggagtgagcaggaaccaactcttgtacagcagcctcggtgcctccttgtgtttacctaaaggggcaggcccctctgaggatgggggaagggagggctcagaccatttctggtttgctccctgcttggcagtggcccaaggtgtgctgggtcactgtgttgcagttgtatggagtgggactggagggggctgatggtgggggtggcctcttgccctcattctgagtgtcctggagctgtcttggcaccagcccttttccgggtacgggcactcgcaggagtcaggctgaccccccaacaagccatcgacaccatgaaattaaggaaagcagcaaaagatgttaaaaatcccccaaggctctgacaatccaaggacaacaggaaggtctttattttttcatctagactgtgcgggattattgcttccagacctgtatgtgggcttcagaataaacggaatgaccataatgttgttcccggtagacctggtttgaacattcgtgagcctctgaaaaggagaaagattttagaaggatgtgttggggcaatctcaagtaccgtgggtctatagacagtcatcgaagacactttatgtgctgggcacacatggccaagtctgagtgggtacagaaatggtaatgagatatagtccttgcctgcagagaacttacattctcaccgggagtcaggatgagggcgagacaccagctcattaacacccttccctcctgagcagttcagcctccaaatactacaggaatgccccggaggttttaggtggaggtgagattgagctgggccttgaggaaggagaagtcttgagtagtggagaataaaaagggacttggccaggtgcgcttgaagtcccagctactcaggaggctgagacacgaggatcgcttgagcccaggaggctactcaggaggctgagacacgaggatcgcttgagcccaggaggctactcaggaggctgagacaggaggatcgcttgaagccaggagttcaaggctgcagccctgtgacagcgcctggaaatagacacggcactccagcctgggtggcgtcatgagaccccatctgtaagaaggtcttttccaatgcggaaggcagcaagggcccacacagggcagctgcaggatccagggggacactggggacaggttctctctggcagctccactgctgctccaggctttcccgattgcctcacccggccttccaatggggtggaggtagtggtagtctacaggcagtgtggtccagtggttacacttgggggctcagagccgccagccccttgggattaaatctcaccaggctgcgcctctccctgtggcacaaggttctcacctcatgcatctcatttgcctcatttgtttttttgtgtgtgtggtgttttttaattttatttatttatttatttttgagacggagtctcactctgtctcccaggctggagtgcaatggcatgatctcagcttactgcaacctccgcctcccaggttcaagtgattctcctgcctcagcctcctgagtggctgggattgtaggaacgtgccactgcgcccagctaatttttatatttttactagagatggggtttcaccatgttggtcaggctgatctcgaactcctgacctcgtgatctgcctgccttggcctcccaaagtgctgtgattacaggcatgagccaccacgcccagcctgcctcatttgttaaatgggacagtgctatgttgttgtaaaggttaaacgagttcatatttgaaaaagctgagaaatgcctgctctgtaacctgttagctgctgtcatgatcatgattgtcattgacaggaggatggagaaggctggggttacgccattgctaggacgttccagaagcctccatgatcttcccttactgtggtcagagcatggtgcagggtctctcccccagcccctcagcactggagccagctgcactgtacccgccctggctctctaggttctgagttttgggactccctttgcatactaggtcacatggaacttgccgtcattcccaggctcccctggaaactctctgtgggtggcagcggcaggaggacttacccgaggccgatgagccacagaagcgggactgaggttgcgtcacacccctactggcacctgggaattactctggagattctttttttattttttatttttttgagatggagtcttgctctgttgcccaggctggagtgcagtggcacgatctcggttcactgcaacctctgcctcccaggttcaagcaattctcatgcctcagcctcctgagtagctgggattacaggcatgtgccaccgtgcccagctaatttttgtattttttagtagagatggggttttaccatactggccaggctggtctcgaactccggacctcaggtgatccacccgcctcagcctcccaaagtgctgggatcacaggcatgagccaccgtgcccagccactctggagtttctctgtggctttcaggagattcctgaaggggcaccagccacgattaaaaagctctatgctgtcgtgacttctgagtcctgggcagggagggaggctgcacccacacaggaagcagcttctgccgtgattcagtgtgctggctcgccgtggtggacagggctgcaccctcacccagcgccccgggagctgacttacgggaagggcaaggaattgcaccctcagagaacacttccccagtcagctaacccggtgacaggcgagcgtgggaagggcacaagcacagggtttcttcctcttctcccccagccccgtctccgcgcctgttctcgctgcctcttgcctcctcacgtccaagcttgtctgctctggcgcattcaggggacctggactggagagaaaaagccacctcgtacggttagtctgtggctctgtctgacttgtgtcctccgccgaggcccctcagttgtgagacagctggctgagcctaagtcctggggccagccctctccctagtctgttgcaaaggtagaaaggcatgcccaggcaggggccacctgccctgcccgctcacgccagaccgcaggcacttgcccgtcagatctccccggcctgcccagagggattctgatagccgagggcaatgcacctggcagcggagcattgcgtttgcgacagtccaccttcttcctggaaccaccccccacaagtgtgaccagctcaagccaggacaggtacagggggacccaggattgccacttaggggcagtggtctggaatccaggtccaggtgacatgggagccaaccctctgcttggagatcccaggtgggtgtttgcagaggacatctcacttgaggacccatggaaggggacacttcccaccccctacctggtccttgggctgccctcctctgacactctcctgccatcccaggcagccctgacagccccatgtgactgggacctagaggtggcccctgtttccgccccagtgtttgtccacaggcagtgttgcgtgggctctgaagtttgcctaagatggacctgataaggggagttcagtacacatcagtgcaggcccggccagggggtgatgatggcagttcctgggcagatccagctggctttagggtaggaggggctccagagagaggctccaggcccctaggggtgtgaacctttggggtgaggcgggaagtgacgcgctgggttcctgcgcctctgtttgttggagctattaccttggaaacatcccagctctaggcggttgccagggatttatggggatcagtgggtgccaatccctgggtgaagccctcggggcttgtacacagcacacagcgctgtggccccatggctcactttgctgtgtgaagtggctcagtctccgggagagtccttagccaggcaggcctgacggcaactgccaggtcatggtgatctggaatcgctgaccaaagggagtcagtcctggtgggtggagggacttggtgggcagccatcgtgatgccaggcatggggatcgtgtgtcacccaggcctgtgggtgccgagcttctgtgggagcagtgaagtgcccccgtggccgatgggctggtcacccctgcccctttcctgatgtgacagttgtgcctgggccccgggaaatttgccaggaggcctggcattggcctgctctactggagcggccctgctgagctgtgagctgcccgtctccctgaggttcctagcccatttcaactctccatgtggatttggtcattcattccagaagcgtctgccgggcgctgctgagtgtcaggttctgtttgcctcctctcctgtacgctggaggctctgggcaccagctctgcagggtggcctggccttgggtctccagggtagagcatggcactctctgctcccagcccagtttctctctgctttatctccctgaccccaccctgggcatgggcccatttgcagcccctgtgaagggagacattgagctgttgctggcagaggaggggcggctcctgggcactgcttgccaatggcctctcggcagctctgtgacagctgagctttgttcccagcctaatctgacctggttctccaaagcatgactgttggcagcctgaaaacctccaggacaggaaacaggagtggcgcagggaatgtaagatgatcccagcttcaagtcactgggcggcccttagacccaggctgcctgctgtctctggcaggaactcaagtcgctggtcatcctcagagcggtgttggcccggggccttcagtggcctttgtgtctgggtgagaggaaccctggatggccactctgccctgagtgtgtgggtccccagaagtgctgggttagggggcacggagggccagaaagtcccctttggagcgctggactctctcgctgactcctaccccaccccggcctggggtttcagagaaggggtccaggcaggagtgtcatcttttctcaatggggatgtggcttcagtctctgtccaggtgggtgcattgctctctttccggctcctcccaggctgcttaaatgacctgtgacgaggcctgcgccatggccggggccctctgcttttcccagcgctgcacctgggaaccaggggttgggccccggaagccgaggatgtccctgaatgccatgcctgggcacctgtcctggccaggcgaggcgtgttggggcagcggctgagatgggagcagcagcattgcctgccaggtttgagatgggccccgggtgagtgtggttaccaggaagggctgggcagagcaggcgggtgggccgcccctggggccttgttccgcagatcaacctgatccgcaccctggggccggggcttcctttcacagccttcccatgaactatggctcctgtttccatcccaaatcagatcccagaagaggaataatgtccatgtaacccaagccagttggaagtgggttacatccaacccctgtcatcttccagcttgttaaggacttgactaactcaacccagagggatttggagggttgtctgcaaaacccactaataacagggaactttagctctgtagccacagggtctacagaggtgtcgggctgtcgggttattgctgggaggtgagccggtggcgtagacaccatggaggcaccggtagtggaagagctgcaagtgcacacagaggccggcaccgaggggcggggaggaggaggtggtggatttctcgccagtgttggcatcatgttgcctccagcatcagagacccaaggtgtggctgaccttggctggggcgatgagtcattggatagcagagccttcctggtagctgggggttaacgctttaactgccgggactttgtattatgccgcttcttttttttgttttgtttggtttggtttggtttggtttttgagacggagtctcactctgtcacccaggctggagtgtggtggctcaatcttggctcactgcaacctctgcctcctgggttcaagcaattctcctgcctcagcctcctgaatagctgggattacaggcacgcgccaccatgcctggctaatttttgtatttttagtagagatggggtttcgccatgttggccgggttggtttcaaactcctgacctcaggtgatccacctgccccggcctcccaaagtgctgggattacaggcatgagctaccgcgcccagcttgcatttatgcttttttttttttttttttgagatggagtttcgctcttgttgcccaggctggagtgcaaaggcgcgatctcagctcactgcaacctccacctcccgggttcaagcgattctcttgcctcagcctcccaagtagctgggattacaggcctgcgtcaccatgcccggctaattttgtatttttagtacagacggggtgtccccatgttggtcaggctggtctcgaactcccgacctcaggtgatccgcccgccttggcctcccaaagtgctgggattacaggcgtgagccaccgcacccggcctatgctttttattattattatttaattttttaaggaaagcaatctaaactgtacactgtatcttttctttctcttttgctttttgttgtcagttttctgtattacttattgccaaacaacatgaacaggaaattgaaaggaaaacttcaacaatcattggctgtagcatttcttctgtgttccattcagtgcttgtctcctcaggaacatgacatagggtttgatttaattatgaaaggcgtatattttcagagttttatactccccatagaatgaatgttgaattctgttcttttcacttgaaattagatctcaggcatggatttcatgattatcactataatggctcttcagagtggacattgcatcttgtagggaaccaccctctccccagctgctggtgtggacgctcctccttgatggtgtgggtctgggcccctgaagggtggtgtcctgagtaaagatgttacagtagccatgcttatagctttgggcctggggctaggtggagactggcttcaaccctagagcttgctgtcttaaaataaattcttttttttttttttttgagatggagtctcgctctgttgcccaggctggagtgcagtggcgcgatctccgctcactgcaagctccgcctcccgggttcacaccattctcctgcctcagcatcccgcatagctgggactacaggcacccgcccccacgcccggctaattttttgtatttttttagtagaggcggggtttcaccatgttagccaggatggtctcaatcttctgacctcgtgatccactcgcctcagcctccaaagtgctgggataaaataaattcttagggccgggagcggtggctcacacctgtaatcccagcactttgagaggccgaggcgggcagatcacaaggtcagaagatcgagaccatggtgaaaccccgtctctactaaaaatacaaaaaattagctgggtgcagtggcgggcgcctgtagtcccagctactcgggaggctgaggcaggagaatggcatgaacccggaaggcggagcttgcagtgagccgagattgcgccagtgcactccagcctgggcgacagagtgagaccctgtctcataaataaataaataaataaataaataaataaattcttatacccacttgcattatttattattattattattaaacagggtcttgctgtgttgcccaggttggagtgcagtggcgtgatcatgacctcccagtctcgacctcccagtttcaattggtcctcccttctcagcctcctgagtagctgggactacaggtgtgcgctgcatgcctggctaattttttttttttttttttttttgagacagagtcttactctgttgcccaggctggagtgccgtggtgcaatctcggctcactgcaacccccggctcctggattaaagcaattctcctgcctcagcctcctgaatagctgcgattacaggcatgtgccgccacacctggctaatttttgtatttttagtagggacggggtttcaccatgttggtcaggctggtctcaaactcctgacctcgtgatccacctgccttggcctcccaaagtgctgggattacaggtgggagccaccgcgcctggcatgcctggctaatttttaaaaaatttttgtagcagccgggcgcggtggctcatgcctgtaatcctagcactttgggaggccaaggaggtcgggagttcgagaccagcctgaccaacatggagaaaccctgtctctactaaaactacaaaattagctgggcatggtggcacatgcctgtaatcccagctactcaggaggctgaggcaggagaattgcttgaatctaggaggcgggggttgcagtgagctgagatcgtgccacggcactccagcctgggcaaagagagtgaaactccgtctcaaaaaatttttgtttttgtttttgtagcgacagggtcttgttttgttgttgcctaggctggtactgaatttccagcctcaagcgatcctcctgcctcagcctcccaaagcgctgggagtacaggcgtgagtcactgtgcctggcctccacttgctttggctgcctttctctgtcttaggtaaccatacatttctccaggtaattaagaaaagattgcgcatgatgagtcccttttctggtatttctgggattgcccccaaaaccagacaagtgttcttaccttgacattttattaagactttaatgaacagaatgccgtttgccctcagtctgctggtccccctgcgaaggcccagggcttccttgtttgaaaagtcatccccttgtcgaggtctttgattccttttcaccacggcagtcatgccgagggtccacagagccaccccttccccatctcttcctcggcccctcaagacgcatctgtacccccggagatgtctctttgttttcttgggccacctctcctggccgtcactcaccctgctgactcattacttgtgcaacagtttcttctggaaccctcaggctcctgccacctaccctctgcagtccccgttttgttcctcttgcctcagtcttcctccccatcacccctctacctgttggtctccatctctgtctatggcacatccctgtgttatactctgatggctggataaaggttgagtgaaacgcatctacccctttggtgactggggtgcccattaatcagaagggatccaaggctggcgtagccttttcccgcatcctggggtatcgtcctgtggctcttccttgttggagtctgcagttttttgtttttttttttttaaattttttgagatggagtctcgctctgtcgcccaggctggagtgcagtggtgagatcccagctcactgcaacctccgcctcccgggttcaaccaattctcctgcttcagcctcccaagtagctgggactacaggcgcccgccaccatgcctggccaattttggtatttttagtagagacggggtttccctacattggccgggctggtctcgaactcttgacctcaggtgataggctcgcgtcggcctcccaaagtgctgagattacgggcatgagccaccaggcccggccgttgagattaccttcataagccaccaggcctggctgtagttggcagtttttgaccactggtctcgctccacgtgatctgtgatcttccccttggccccctggccctgccctgttcatctgctcacctttctcatgcatgcggtttgttcatagggtatgtaatggggtctaaccaggaaatggaaaccgcttgagcatttatttatttatttatttatttatttatttatttatttttcccaagacaaggtctcactctgtcacgcaagctgaagtgcagtggtgtgatcacagctcatggcagccttgaactcctgagctcaagcgatcctcccttctcagcctcccaagtagctcggactataggtgcacactatatgcctgcctaattttttcttttatttttgtagagacagggtcttgctttgttgcccaggctggtcctgaactcccaacctcaagcaatcctcctgcctcagcctcccaaagtactggagctacaggcatgtgccatcacgccttgctaatttttgtattttttgtgtgtgtgtaaagacaaggtcttactatgttgcccaggttggtcttgtactcctgggtttatgtgatcctcctgcctgggcctcccaaagtgctgggattacaggcgggagccacagtgcctggtccacttgagcatttagaacagaaggacttaaaggcggggaactagttacacagatgatgggagaggtgaaggccagacagggaacagagaggcaatcagcaggaaatcaaagtggtgtgggcttatacagccctctaaaggtatggatgcaatgattcatttagaatgagaaaataaataacagcaaattataaattataagcagctgttaaatatcacaaacatcactacatgcagaagagtaccagtcaactgtcagtcatatctccaaagttctatttctcccacatttttggcattacttcttcaatatgatgactttgtaatatcgttttctatttcgagaacagaaaactgatcaggctggacacagtggctcgtgcctgtaatcccagcactttgggaggccaaggcaggtggatcacttgaggccaggagttcaagaccggtccgggcagcgtggcgaaaccccgtctctactaaaaatacaaaaactagcagggcatggtggcatacacctgtagtcccagttacttaggaggctgaggtgggaggattgcttgagcccaggaggtcgaggctgcagtgagccgtgatcatgccactgcactccagcctgggtgagagagtgagaccatgtctcaaaaaaaaaaaaaaaacaacaaaaaaaaacataggctgggcgtggtggctcacgcctgtaattccagcactgtgggaggttgagatgggcggatcacttgaggtcaggagtttgaaaccagcctggtcaacatggtgaaaccccatctctaccaaaaacataaaaaattagccaggtgtgatgacgcacgcctgtaatcccagctacttgggaggctgaggcaggagaatggcttgaacccaggaggcagaggttgcagtgggccaagatcgtgccattgcactccagcctgggcaacagagtgagactccatctcaaaaataaataaataaataaagcgaatgaatctccttagttgatcaaattttgtttttatttttggtagttgggatgtatacaaaagtggcggtcaacatggagttggtggtgctgctacaattgttttgttcaagatacacaggaattctggtaaatcctgtttttttctttttttttaaatgtgattcccatcaagaaagaagtaggaaaatgggggagatttctaactgcatatgaggcatttgtgcatgtatttctgaccagagagacttttctgttttgactccacattgaaggaactgaatcctttgcttacaacttcacctctggtgatgggagtaattttccacagatttgcttctggacccgtgcatttcaaatcttgcttctctccactgcgcacgtttttccggcgccaggcaccgcaggatatgttcgtgtcttgtgatttttgattctgcgcggtaggtggaattggaacggtgagtggagcgagtattgctggaatccgtttccacaccgggatagcgagcagtaactgaactatacatggaaataaatgggaactacataaatataacccgaccaaagccaaactaaatatctttccagttcaacttctccttagcaggagcccccacgtggcagcaagcctccgtttccacctcacacaagagaaaatgtgacgggcaggaactcaagactggaaatgaacggggacgttaattgattgtagggaaaatattttccattttgtaaattttacaaaaaatgtttgaccctgtggacatgtggttagggcccttctcagtgccttgagagggaaccatgcaggtagagggagggttcttagcattgtgggggtgacctggagattggcagcagggtgccaccaccacccctaggtggggatgagagggaggaagtcctgtgaccagagtccaggggccagagtcacctgctgggagcccaaacaaaggtgggactctggcaggagctggaactacacagaggaccacctctcctgctggagaagctgtctgaggcagaggaggtggagagctcccgcgccctcccttgcttccacctcccaggttcctcccaagcctctcgttggttgaacccagcccaaagccagcaggcctggggacctggacacctgagccagcagaggtcggcgtttctcccacacaaaggagggcacaagaagtgggaggcacggagggggatcaggccaggacccacacaggatgtgcaaacaggagctcccctctcttcccaccccaaatggcatctgcagccggcctcacttccctgctgttagacaggaagaggaaccttgttcccggcaccagctgcccccaccgccccccaccccacggaggcccctttcctctctggcctttgcttgcaatcattggcgacgctgatggaccatatcttctggggagtttggtcatgaacatggtttcccatttgttgtggaccaaactgtgcccttccccttgaattcctgcgttgaagccctaactcccaatgcagctgtaattgaagatagggcttttagggaggtaattaaggttaaatgaagtcatagggcaggaccctaatctaataggattgatgtccttataagaagagggagagacaccagagatctctcctcccccctcacttgtaaacagaggaaaaatgacggaggacacagcagggaggtgggtacaagccaggaagaggggcctcgccgggaactaaccctgacggcaccttgatccgggactttgggcctctcaaactgagaaatacatgtctgttgtttaagtcactccctccacagtaatctggatggcagcctgagcttaccaaggcaccgtctgcatcagccagggctctccagggagacagccaataggagatggatggatggatggatggctagatagacagacaagcggacagagagagagagagacaggcagacacagacagacaggcagacaaatggctagatagacaagcagacagagagatagagacagacagacacaaacaggcaaacagacaggcagacaaatggatagatagatgatagatagccaggcaggcagatagacacagacaggcagacagacagacagacagatgataggttgggttcagtgactcttacctgtaataaccagcacattggtaggctgaggccggtggatcacttgaggccaggagtttgagaccagcctggctaacagggtgaaaccccatctctactaaaaatagaaaaattagctgggcgtggtggtgcatgtctgtaatcccagccactcgggaggctgaggcacgagaatcacttgaacctgggaggtggaggttgcagtgagctgagatcacgccactgcactccagcctaggcgacaaagtgagactccatctcaaaaagaaaaaaaagatagatagatgaatggatagatagctagatagatgacagatggatgataggtagatagataattgataaatagatataaatgaccgatggacaggcagacatagatacattgattaggtagatgatagatggatagatagaagatagatggtggatgggtgggtagataggcagatagacagttagaaagatagatgatagatagataggaaggaatttattaggggaattggctcataccattgtggaggccaagatgtaccacagaaggccgtccgcaagctggaggcccaggaaagccagtatcgtggctcagtccaagtctgcaggcctcaggactgggaagctgttgatgtaactcttagtttaaggccaaaggtttgagagcctggggaactgctggagaactgggagttctaagtccaagggcaggagaggaaggcatcccacctccaggagaaagagggaattcaccttttctctgcctttttgttgtctggcaatggaatggtgtcatccatattgagggaggatctttaccactcagcccaccaactcacatgcccatctcctccagaaacaccctcacagacacacccagaagcgatgcgttaccagccatcccttaatccagccaaactgacacctgccgtcagccaccacacaggctcagaagaatcgtggttgcatggtgatggtctccatcccgtctaaagaagttgaagatgaactgttggcacaagccatcgttctttcaggctccttccagtcgttcattcttttaaaaatgtattcattgagcacctgctgcatgccaggtgctgtgacaagcactggggcacagcagtgagcaaacaaggactcttgtttcttggagtttacatgcagtagaaggaaacagaatcaatgaattcatcagttctagaaactatcaaaataggactaagagctgtggtgagaattaagataaggtgattgcatagaaagtgactgatggctgctttggaatgagtggtgaggggtcacagagatgatgacagctgagttgagattgggaagacaggaaggagccagcagtgcaaggactaggctggaagcaagcttggtgcattccaggaacagcaaggaggccagaggggctgcagtagagcaggcgaggaggaggagggagacgcaggtcaaagaggagcctggggccagatggaggaccctccctccaaagctcagtcatttcctccttaaaggagaatgtgttacctccaaaagtcacatatgccagcacagtgtctggctcatcatatgccttcagtaggcggtgagcatggctgttcttgttattactacatcacaattactaggaataatggagtcaccaggctttgcatttacagcaatgtgagggagtcagcaagcttccctggggaacccatctcccctcactaagttcataagagcctgataaccaggtcaatgtagtgagagctatagctgcccagtgtactggactctttagccacgggccaggacactttcatctcagcagaaacctctaaggggactggggagtgtgctgtggatgtttctgggttactcagacctcctggggagccttccccaccgcagctgctgcagggagctcagctgcagtgatgaactgcggctcagccttgtttatgggaaaaccctacatgggagatgggacggtttcctgttggttctctcggcctcaggttgctttcacaagtgcagggattctcacctgggtgtgtgaatggggctcaggatgccccaagggtatgtggagatgggggtcagctgtcttctctgatgcctctgaacctcctccccctgcctttctgcatctcattgcttcctggcctctctcactttgggtgctttggaacaacatgcaatccaatacacaggctgactttattattttgttttgttttattttattttattttggaaacaaaggctctgtcattcagcctggagtgcagcggtgcaattgcaactcactgcagccttgaacttctgggctcaagtgattctctcgcctcagcctctcaaagtgctgggattacaggcatgagctgctgtgcctggcctaggctggctttaaaagctcctcactctctctgcatcctgatgatacctacctcctggagcaggctcccagccattggcttcggatactttgtagctattattggccagttgtggcatgtgaagctgaggctcaggagaagggcagtcctgtccaaggccacacggctcagtgctaacactcagacttcagtgtttttatctccctcctggtcgcttccacccttagtgcatctctggaggcccaagggagctaaaggccaggctttggtcagctaagaatttaaaaaagctgtctctgtgctcctctgtcaatccatcactccattatctcccccgacaatgaattcagtttgaatttcagataaacaaggattaatttttagtataagcatatcccacaacagacttgggatatacttatgcctaaaaatgattcattgtttgctggccttagtagctcatgcctacaatcccagtgctttgggaggctacagttggagaattgcttgagtccaggagttcaaggttacagtgagccatgatcatgccactgagctccagcttgggtgaagcagcaagatccttatctcttcaaaaaattgttgattgtttatctgaaatccaggtttaactgagcatcctgtattttatatgagaaccctatataggtgagacccagagtcccaatgcccactggtaagcctttgcagggaggctctgtgggtccttggctggcactgatgccctgtgatgagcagggccatctggcaaggtggacgcctgctgcccatgcaggcagagcaaggccctgggcaggtatgagctgatctcaccttccccagcctgggagccagatactgttggcagcttgccgtcaagagaggggctggtcaccaagagaggggcggcctccatgggccttctttggcttttggctctcccccagccctcctcctaccccaaacagaggccaacggcaccgcaccagaaccagtgtgctgcctcctttggttggcattttgtagttgggtagactgtttccttctcacaggagctggtggtgccccttccgcttcacagggaggatggctgagacccctgaccttgacacagggtgctgttctttttttgttttgagacagagtcttggtcttttcacccaggttggagtgcagtggcatgatgttggctcactgcagcctccacctcctgggttctagcaattcttctgcctcagcctcctgagtagctgagattacaggcgtgcaccaccactgagaacaatgccttctacagtgtttattctcctgtaggagcaagttcctaaggcaaggaggttgctcccctcatggatgaataaattgactttgatccacagccccacgtgtcagccttgagggtggggaaaggttgttctgtgtctaggcagggggtgggggcaaggccaggagggcctggtgcccagtgtacctcttcaggacacaactccaggtagcagaggccaaggacagaggggaggagaagagggaggtggccattatctccttatctcagcttcctttggagataagcttgagtattttagttgtccactaagtctggagataagtctggaatttaaacctttgactttgatccagcccttcacagctcctgtgagcaaactgagcctcagaaaaagggagtgaagcctgtgcatcctggacgcccccaccccaggctcaaaccgcccccaccccaggctcaaaccgcccccatcccagctcaaaccgcccccatcccaggctcaaagcgcccccatcccagctcaaagcgcccccatcccaggctcaaagtgcccccatcccaggctcaaagcgcccccaccccaggctcaaaccgcccccatcccagctcaaaccgcccccatcccagctcaaaccacccccaacacaggctcaaaccaccctcaacccaggctcaaagcacccccaccccaggctcaaagcatccccaccccaggctcaaagtgcccgcaacccaggcttaaagcgcccccaccccagctcaaaccgccctatcccaggctcaaaccgctcccaccccaggctcaaaccacccccatcctaggctcaaaccgcccccaccccaggctcaaagtgggaaggagccacagggaaacaaacgggggaggcacggatgaccaggatgagggtctccatgacccacctttccccaggggctatctcaagagctttttaaacttttattattttttaatagagatggggtcttgctgtgttgcccaggctgatctccaactcctagcctcaagccatcctcccacctcagcctcccaaactgctgaggttacaggtgtgagccactgcacctggcctctctcaggagtttcaagaaaaaaaatgggaatagatttgtgtgtgtgtgtgtgtgtgtgtgtgtgtgtgtgtgtgtgtgtgttttgagaaagagtttcgctctgtcacccaggctggagtgcaatggcacgatctcggctcactgcaacctccgcctctcgggctcaagtgcttcttctgcctcagcttcctgagtagctgggattacaaacatgcaggctgattttgtattttcattagagacggggtttcaccatgttggtcaggctgatctcgaactccggacctcagatgatttgcctgccttggcctctcaaagtgctgggattacaggcctgagccaccgtgcccggccaggaatagattcttttctgtagatgacttctgtcattattgaaaatggatgtttatgcacaattgaattgtcataacgcctcatcctaaaaagctcctttttgagaaaatgtgacttttgatagaggagagactgtccaggcctcattcattgtcagcacaaaggcagagcaggggtgtggcggtgtcaccctcctctgagacagccccatccctgctctgcccaggggttcagaagtctggtctattcgagcccacagaggggtttggagtggctgtcttacatcacaggtggggtctgtaaggatctgaaatgacctttgagaaggcgggtgtggtgggtgcatttcaatcattaaagtaacaacaatgatacatcaaatagtgtctgctcagattctgagtgcctgtttaaacatttccatcttgtgacttgccagattctagcataacaacccaggtaaaagaaaaaatagctgggcgtggtggcttgtgcctgtaatcccagcgtgaggccaaggcaggaggattgcttgagaccaggagtttgagaccagcctgggccacctgagaccccacctctgaaaataaacaaaccaataaaagaccttcatgctctatgtctttcttatatctaggttccccaaattatatgcattggggaaagtccattaagagaagcccctggccgggcgtggtggctcacgtctgtaatcccagcactttgggaggccaaggtgggaggatcacaaggtcaggagttcgagaccagcctggccaacatggtgaaaccccatctctactaaaaatacaaaaattagccgggcgtggtagtgcatgcttgtaatcccagctacgcaggaggttgaggcaggagaatcacttgaacctgggaggtagaggttgcagtgagccaagttggtgccactgcactccagcctgggcgacagaaaaagactccatctctaaataaataaataaagggagagaagcctctgggctcctagatacatgggtcagtgtccacccctgcaaagctgctgtgcccaaagaggggctgtacttggtggaattggggcaaaagagcagggagggcactgggcagttgacctggtctccactactggaaaggggctgtgctgctggtgccctgagctggttccacaaggaagacactgcacagggcgccctaagtttgctctttctgcctaggctcaccctttcctctccaggaccagggagccccgctcgtctcctgtcttcggcatctgctctctggcttgtgagcactgcatttctttctgcttggaacgccggcccatggtgggtccccggactcctgccttctgctgtcttttgccatatctcgtcaaagtgtgttttatttatttattgttattattttttgaaacagagtcttgctctgtcgcccaggctggagtgcaatggtgtgatctcggctcactgcaacctccgtctcctgggttcaagcgattctcctgccttggcctcccgagtagctgggattacaggcgaatgccaccacgcccggctaatttttgtatttttagtagagatggggtttccctatgttggtcaggctggtctcgaactgacctcgggtgactggcccacgtcagcctcccaaattgctgggattacaggcgtgagtcaccatgcctggccaactattataatattgatattataataatatcacagccagataacggtgactaacgcctgtaatccgaacactttgggaggctgaggcaggcagatcacctgaggtcagttcgagaccagcctggccaacgtggtgaaaccctgtctctaccgaatatacaaaaattagccggagcgtgatggcaggtgcctgtaatctcagctacttgggaggcggaggttgcggtgaactgagatcgtgccactgcagtccaacctgggtgacagagcaagactccatctcaaaagtagtaataataataataataataataatatcacttattgagttttaattttgtgccaggcactgtgctagtacttgcgccatgtgacctcattgactcggaacaacctatgagtaagcaccatctctgtccccaaggaagctgagactcaggaaatggaagtcatctcccagggcccacagcaagggcctggcgaggtctgcgttcaaattctgatcatctgactccaggctttcctgcctcctttgcctcccaaaaactcaaatactttcatctgggatgactccagacagctagatttcaattgtcttctctccttctgagtatgttttattttaaaatcacataaagataactcacttctcaactggagccacggaatcgttagatgtcttggagacttttctagctacctctttgctggactcagacacaggcctgaataattaggtccaaggagctgaactggagccgctcgtggccagaggtcccttcctgggaacagcagtggcggcagcggctgcgctgagcctggcaatttgttcaagagcaggggatgctcaggctgcgctcgcccccttcttatgaacggtttgctttgcgtcttctctgtgccaagggctgccaggcaccagatgcccattttaggaaatcagaaaaataaacagtgtaaataaaacaaaaactccacccaagaaatctgagacagatgctgttttccccaccgtttctccacccccatgctgggtttggagagagtgggccagcatgtttcctacggataagaggccctggggtatttaacctggatggaacctcttctattttccttttgcctggtgctagggggcagaaggcaggggtggtgtccatctggcccagggaggaggatagggcagcctttgtcgccggcatcccctgcagagatgtctcagccagaagtgactccatcctcaggaacgtgtgtcctgttctttgctgggcggcccctccttaccccccattgtttccacagtggggtgtgctagatttatgggcagagttctggttcactctcagccccggacagcagaatgtcccagtagtgcactgatggtgtgtgcgtggggatgtgtggaacaggggatagtgaccccgtgtgcgttatatgcagtgcggcttccagtcgggtgtgtgaagggggtgctcatggccatcgtggaagtgagctcagctggggctggagggtccaggctcactgtatgccactcagcagccttgggagtggggttcatcctcctccccgctcctctcccctcctggtcctgggcagcccaccggagctgcactctgggccatctctcctggtcttaaggaggctgtcatttctgggaggcagatgctggcccttccatccttgcttcctggagatctgcgccgaggtctgcctttctgtctggagggactggccaggaacccctgggttttcctggtggggtttttgttgcttagcagtgagcagagtgagtgggcaccaagaggaggatgctgggtgaggtcacggacatggctggggcaggctgggggtgctggaggtgaattccgcagctgtgcgaccttgggcagtttgcccagccctgggcctcgcttcctcctctatgaaatggggcgggagcacctgcctgctggggttgtgggttgggtgaatcggagctaaggtacagctcacagcctgccgtcagaccctcgcaagcagaagtgggtgtccctgctcagcgtcctccggtccctccttcaaggctcagctttgtcctcatctcctccatgaagcctccctggttactccaggagtcacgacccacaccctctttggagccttgtgtcacacgcatttctcacggtgttgctttccctggaggatgggttcaactaaaattggggcccatctgggggttccctccagcaccagagaagctcaggcttagtagagatgggtaccctgtcaatactagttccgcgaaggatacactgtgctcattctgctgccagttgctgagtctggtgtcctgtagttatggaacatgtgtacaggcctgggctgctggacacgaaggccagatgggcagttcactctgcctccgctctgagcctttagaaacaagctggctgcacccatttccatctggtcacagtttaggagtggggttgtggaatggatggaaggaaggatgagtgggtgggtgggggggtgggtgggtgggtggatggatggatggatgatgggtggatgggttgatggatgggtggattaggtggacaggtgaatggattggtgggtgggtgggtgggtgaagggctgaataggtgggttgggtggatgggtggatggatgtgtggaggggtggtggggtggatggggtccatgggtgaatggatggatggatgggtgaatggagtaaatgagtgggtggatggatggatggatgctgcaagagcctttctggagggttccagggaggaactggcatctttgaccagcagccagcatggtgatcagatacagggaggtgtctgggtctgcctgatcccttatctcactgttggtgggactgggctggttatgtgtccctgaagctctctgaagggtggctgtatggcattgcccaggggacatccccagagtgccgtgctctacagcaatagggtggccgcctgtgctcccagggccgctcctcctggcagcctttcgggtttgcttggcttagcacctcagcaaatctcctcgagttaggacttgcctgccatgagcctctccaacaagcagccccaggccaaggcctgtgtgtgggcagagggagcgcatgccgcgggaggctgcattaatctgaggttctgtttttgttccctcctggggcaaaaggtaaaaatagcctgtcccactccatccccaaatccagcccggctgcacccagccctgggagtgaagggggctgggtcaggactgcccgtgagttgtagaccctggtgtagggaaaccctgattcataagacgggtggacatggaggaaggaggagactccgtccagcagagacacgcttgggtgcagcccagcttggagtctgatggacgtgggctcacctgtgtgcaactctcattcactgtgtggccacagggaagtgacactctgtggagactcagattccttatctgcaaaacaggggtagtagggcttgggggaggatgtgtgtgaaggtttggcccagggcccctccagcagccagacagcagtggctgtcatccctccagcgtccagggttacctgggggagtagggcctctgtccccagatgggccccgtttctggctctggaactcacagcaggagcaaaggcgaggacattcctggtgttaatcatccacccggagggagagcgccagtggccttgtgtgacctttgccctttgtctctgtctttaggaggcacgcggacctccagtggccggctccggaggcttggtgactccagtggcccaggtaggtggctcgctccgctctggccccacccagctcatgggtgtgtttgtgctggggtcccttcattctggtctgggacctgcctccccacctggcttccctggatgagtggggccacttgcccatttcccagggagacgcagtctttgacggctttggactcaggtggcttccaggcctgtcgacgctgccctgctggagatgatccttgtgggggcaggggcagccacccccaggctcagggagcaagcccgtgtgtgcgggacagaggagagaacaggagatagatagggctggatgatttggtttgagatgctgaggggacagatgtgccatggacaggtggctttggccgtgagcctctcggtgttggttcagtatctgtgggctccctgcaaccttgcaggatggaagatgctccaggatagagcagatacgtccggtgttatctaggaggaaataagtgggcctctggcagtggtcactgtgctactccttgtgctttttccatgtgtttggaaattttccacactaaccagtagggaagggaaacagatgcacccatcagagctctggggctggccgtccaggacacgagttacagcttataggcttgaagggactctaccaacactgggtgcagcctgggcaagggagtgggacagagaggtcagggctctgcctccagcccttgccccccagggctgagtctgcgcgtcatcttctccccactgggtgtccctgatctcccctgcctgaccccagtgtggccatgctagtgcctctgtttctgggagcctacgttgttcttggctgtcacttccagcggccaggctgggacaggtgcccatctagtggcttttctatttggagaggatgatgggtcacagcaatgaatggacttacctcccctaggagacgaggagctctgagaagagcagagatggcgtggtcacctgtgcatatgtgctgggggccaactgggtgccagacccctggctgccatcatggtggcagacaggcagggactgtgccttcatgaattagccattctagaggagacaaagttaccaaaggacacggacccggagtcaaatccacacaaatagagcgcctgtggaccagggctgccttcagaacaaggtgagacagccgtcctgccaggacaaggcgcctacgggggcaagggcatgtgcccatctggagccgccacctccatgctctagaccagctccgtctaatagaaccttctgtgatggtgggtctgttctatacatctgcactccgccatcctgtatggtagccgcttagccgcctgggtctattgcacactcaaagtataaatgtttacgtttactttattcactcatttacttgcatagaattatttatttattttaaatggatttccacttatatctacgtgtggctagtggctatgaaactgaacagttccagaccacactggcacctgagacctcagaattctagacccaaagcctgcttctgatcctgagcttgcttctgtggggacagcacagacgcctcctaagtctgccttccagaggtggatgcagtgcccgtggactgtgcaccaccaggcctggacagtggagagggtggctttttacagggagtgggagtggaggggatgccgtgtccacattgagtgcatgtgaggccccttgcagtacaggatgggactgtatgtgggaagaggggggtgatgctctggctggaggcccctgggcagctgcatgattcagcgctgtggttaagaggggctccgcccatcgcagtcatgttgggcactaaccactggacagcccagccgctgctgtgtttctggggagcttttctccggctccgcatctgatctgcctctccatctccttccctctcattggccagcttctggtggaatgggtggggagggtcccccagttcttgtgggggttgcatcttgggaacctggcaccctgggctgcatggacacagcctcccccggcggttgcttccctctgctcagactggctggttctgtgctgtcagcacttggcagccacgatcacagctcagcttggaagcctaaggcataatttgctgaatcccaaagctgcaagctggtgatctgggtttgcgtgggactgcctgctgacacacggggtcctccctctgtgggcctctgtgggctctggcccgagacaccctttcctcatcttcttggcttctttctttctccctgcctcccttttgctaagaccctggtccaggcaggagttcattcctagacgccccagcatctccggcctccccatttgacactccccagacgactgtctgccatcccatcctcccagcccagcttctctgtagatccacatctggccaatctcctatgtctgggactcttgccctccccagaaggacgaaggctcttctcgaggttgtgtttgggactgggccagggatgacatttctggcaaaagcttaaatgacaccatgatcaacgctttggtcagctcacacactttctttccttttaaaaaaaaaatggaattcttagagctacaaaacaaaaatgtaaagaataaggtaataaaacacctgtgtactcaccatcccgcttaagaagtgagacattgcaggtgtagccgcagccctgggtgaccttctccatcctagccccactcctgctgcggtgcccgcccctctggattgggatctggccccgggcaggcacatctgtgctgggcagtggtgtgtctgagaagcctaggtctccttttttttttttttgagatagagtctcgctctatcgcccaggctggagtgcagtggcaccatctcggctcactgcaacctctgcctcctgggttcaagcgattcttctgcctcagcctcctcagtagccaggattacaggcacccgccaccatgtctggctaattttttttgtatttttagtagacacagggtttcaccatgttggtcaggctggtctcatacccctgacctcaggtgatccacctgccttggcctcccaaagtgctgggattataggtgtgagccaccgcatccggcctggtctcctcttgcatacggtcatcagcatcgtgtgactgagcagcctaggtctgtctcctcttgaatgccgtcatcagcatcacatccttggtgcctcactggagtcagtggctgccctgcctgtgcccacaacgtgacggcgtggagacttatccgtgtagatccacgaagccttggttcacttattttggcagctagcgagtgttcctctgtgtggggaggcagagtttgcccgtcccgtggcccactggtgacatcgccgaaggtcttctctgttactagtgctgccgggaacgtgtgtttccccaggtggatttggctgggctgtggagatgcgcttctcagcccttctagatgttaccaccacgccctcccgagtggccttctggtaggctctcccatgttcgctcattttctgtgcctcaggcagccgcctctctgactgagcgtccagcggacttttgccctgtttcccacggtgcacggagcatttcatctcagtggtgcctgagcttccctccctctggccctcagaccccggctgggatccttggagccaactcctctgcctgacatcccgtgtcgctaggtcctgctcttccatcttccaatacctctggggtgtgtggccttttccccagtgcccccatcatcccttctgtcctaggttgaaccgtgtcccccacaaactcatgtccaccaaaaacctcagaatgtgacctgggagttggagatggggtctttgcagatgtaagtagttaaggatcttgagatgaggtcattctggattagggtgggccctaaatccaacaactggtgtccttaaaagaagcagagaggccacagacacaccggggagagccacgtgaaggcaggagcagatgatggagtgacgcagccccaggccagggagcgtctgggaagaggcaaggaaggaccccccccccaccccaccccagagcctccctagggagtgtggccttgctgacaccttgattttggacctctggcctccagcatgggagagaacccgcttccattttttcaagccccacagctgtggtccattatggcagccacaggacactgatgcacctcccacctggccgctgtggatggacgaccccgcccgcaggaagtctccctcaagcactgcaggtgtctctgccctcacaggggacgcctgcacaagtaggtgtgaaaaaagggccctgtgggggcaaggcctgggctggtgctcgctgcctcccttcatcctatgctagttcccatgcctcttccggcaggagtgcctggctccacctggtgaatcagagccaaactctcctgacaattggctgtcacttatttaactgccaccatccccaggagacagaaaatgccagaagggtggggcctgtgcagtgcctcctcgctatttccccagggcaccgtgccacgttgcctcaatgcacagagtagctgctcaaagtgtgtcggacgaacaggtgccccatgcccagccatgcagacaaaagtgtgccacgtggagggagctggtcgtggaagagaccaccagcatcttggctgcccgaggaccttgcccctgggctcttgcaggcacccctagttcattacttcctctctcacccatagctacccactcttcctctatttctctgatatcagccttgccacccacccaggtttgcaagcaggaaatctcagagttgaccttgacctctgcctccccagcacccccaggtctcaacaggctgccaagatctcatcaactcgccctctgcatactgacccttggacaggctgccccggtcacggtcatgtcttggttgggcctccatcatccctccttggaccagcaggtgccatcctccccacccctgccctgctgtggctccttcccctccacggccaacatttagaggacgattaccacttccctccctgtgtgctggggaccgggtgataggatccctccacccgatcatttccattagacctgggccgggtcttcttactcatagagcccttagtttccgcccccaaagcctcgagggtggattcgtgctgccgcccagcctggccctgataccgctttccagcctggagccccctgcttctgcgctcctggctctgagtgctcgggccccccctggatgggttgccacttgtcctctggaaagcagggcttccatgctcctggacctcctagctgactcagtgactttgggccatcttgtcacaccccttctatcagcttggccttggttatttctgtgtcctccatagcctcggaccagagccacggcgggatgctttcctggtgcgtggcaggcagtcaggaaatattgctggactgaccttgataggagatgcttgggagaattgcccaaaaaactagcttaaaatgcaaatattggccttcttttgcgttggctaaagagtagcatttctccgtttgcctcccgggtaagaaattgatggcgaatgcaatgtctctagggaggagaagaaggtgacaaaaagggtctgtataacggggcacacgctaggcatttgtgactatttaagtttaaattataacataaatgcgaaactctttgccttggtagcccttccacattgcaagcgttcactgccacatgtggctgccatattgactacggcagatacagaacattgacatcattgcggagagttctatgggggggcgctggtttagatcatcttcacgttggatccacaaattcattgtttatccagtgaacggttactgggcacctactgagcaagcaggatgaaagacacccgctctcgggggagtcttccgttggctgcagagaagcttaaactcaggggacctggggcaaactctgcaagggcccttggcctctgcacccccagacctccctcgctctgcaggggcagtcgggggccccctctaggaatggagcgccagctccagctcctgtcaggctacagcccagatggttggctgagcacgagcatgtgagagtggaattgggcccaaccgggctgcttctccccgttgtcttggtttccttccacgctgacctggaaggactcctaaagcaacaggcctgcccaggcggtttgcaccagtaaaccctgcagcggccccaagggcagagatagctggattgtatttatttaggaacagccaaagtctgaggcacaataaaaagtggagaaagattccagagaggaatgcagctggcctcagcctgggaatccgtcttgcttgggaggctgtaggcgggccaggctggggccagcctggagggtcttggctggctctgctggcaggtacagtagcagggtcagcaggagggagtccaggacggagctccttcatttttaattcagggaagcaaacttcagtggttgagtctgaggatgagcaggaaatgaatggaaaagtcttttttttttcttttttctttctaggcagggtctttctctgtcccccaggctggagtgcagtggcacaattatagctcactgcagcctcaacctgccaggctcaagggatcctcctgccttagcctcctaagtagctgggactacagttgtgcgccaccatgactggctaattcttaaaagaaatgttttcaggctaggcatggtgacccatgcctgtaatcccagtacttttggagccgaggtgggaggatcacttgagctcaggtgctccagaccagcctgggcaacatgacgagaccccgtcttgactaaaaatacaaaaagttagctgggcgtggtggtacagccctgtagttccagctacccgggaagctgaggctgcagtgagttgtgatcacgtcactgtcctccagcctgggcaaagggagtaaggccctgtttcaaaaaaaaaaattttttttttttttgaggtggagtcttgctctgttgcccaggctggagtgcagtggcatgatcttggctcactgcaatctctgcctcccaggttcaagtgattctcctgcctcagcctcccaagtagctgggattacaggcatgagccactgtgcctggactttttttttttttttttttttttgtagagatgggatttctctatgttgcccaggctggtcttgaactcttggcctcaagtgatcctcccactttggcctcccaaagtgttggaattacaggtgtgagccaccacacccagcaggaaaagtcactttttaaagcgagaggttgtgcgtcctctatagcttggcgctcatcagcatggaggatttactggaacgtgtgttaggtgaggggacatggaagatggcagcaaatccgagcccagagcatcagaaagcatgctttcagccaaagatgcgttctctccacctccgcgcagcacccttccccagtgtgtactcctggagcaaggtggggccgatcctacgaagaccctttcccgaaggcccctgctgcccacatcagtgtcacctggaccgcctgctcccttttctggatggctggaccagccccagggcctcctggcctggtgtggggagcacagtccaccctggggaatgcctggtatgtgtcccctccccactgggtaccaggggatgaagctgtgcttcgtggaaggggacagaggcgctggtgcccaggatggtgcacctggggcggctgaactggacctggctcctactgggcccctgtggagcccagattgttgtgagaaggggtggggaaaggcaggtgatccgcacctttcacttttgtttcacatgggaacaggggcttatcctgcacacatattcagtttggagtatgaatttccatgaagaggaaaatctctattaggctctgatgtcaggattgtccgtgagggccgggccgtgttctggggcaaggacaggagtggagggggcaaccagggaaggcttcctaatggaggaggcatttgatagcatcttgaaaaagaagcagttcctaggccaagccagagactgaagaatgaccacctaacttcttttttttttttttgagatggaatctcgcgctgtcgcccaggctggagtgcagtggcgtgatctaggctcactgcaacctccacctcccaggttcaagcaattctcctgcctcagccttctgaatagctgggattacaggcatgcgccaccatgcccagctaatttttgtatttttagtagagacggggtttcaccatgttggtcaggctggtctggaacccctgaccttgtgatccacctgcctcggcctcccaaagtgctgggattacaggcatgagccactgcacccggccacgaccacctaacttctttctacaagatgccccctggctgacgcaaagcaggttgagtgagtgtgacacttccttcctgtctgtgggttccggcctttccagagcccggccagtgctattggagacaaagtggccttcgctcttccttcccgccctgccaggcccagcctgtgccgctgagccccactttgcaattaagaggagctgtgaaccagtgatgctgatgtcgcagaaaagtggccaggggtctatggggggtgaaggacagggatgccgccctgagaactgtctggaaggggcttttgggtaacagtgcccactccagggtgtgggcaggctggggtggctgggagctgggctcataggctggcacaaccagagtttcccaaagccgtgggcctgagggccctgccttcctgggacagcaacctttggtccaatttgggaaaaggtgggttaaaccaagcccggctccctcactgtaggattactcagtgcgtttagtatgcaaatgtgcctctgaatctaagacaggaccacagaaacctcttcagtgttcctctggagggagggaccgcgggggatccaccgcaggggcctgggtctgcactggcctggtgaagtgcccccttagtgcttacaccatgcgcggtgagaggttggccctcgcctcccccaccctctgctggccttacctcaccacctctgcactcgcctcccagccggctcatgactaactcctgcctcttcagagccaatcggtgctgccaggttttccatttcaagtgatcccccgcctgggccaaaatgtttggattttcaggcacggaggggagatggacctcaggccaaaccatgctgggtaaaactgagggtcaaggctgtgctcagcaagtgctccagccctggccgtcaaacccatagtgtgcacagcgtgcaggaggtggctgggtgaatgaactcagtcatagcccggcccctcactcggggctgttcccaagttcccaccgccagccaggctgggtcagagcctcgtggggccttcctgggcttccctgccccacagcaggagttcgtatggagagtctcgagtgaggttaatgggttttcttcctcttctttttttttttttttaatttgagacagggtctcactctttttacccagccagggtgcagtagtgcaattatagctcacagcagcctcgaactcctggcttcaagcaatccttccgccgcagcctcccaaagtgctgagattacaggcacgtgccaccttgcccagctggggtttctgctttttactttttctcttgtttctaaactcaatacaaagaaagatattacatttataatcagaaaaaccaacaaggaatattatttcaaaattggaaaagggattaaagaaacaaaccaagaaacctctgcgattcctgcccatcggagtcagtggttgttagtggttggcttaacacaatgttttaggaagaaatagaataacagaaagcaactccagtgagctgagccctggctccgtctgtggcgctgcatcagtttcctgcagctgctgtaacgagtggccacaagctggctgggtcacaacaacgcccagccatcctctcacagctctgcaggccacacatccgagatcagggtcaccaggctgaaatcagggtgtccactgggcatagccctctggaggctctagggcaggggttcccagccccgtgtgtcctattaggaactggcctgcacagcaggaggtgagtgactggcaagcgagcgaagcttcatctgtatttacagtcactccccattgctcgcattactgcccaagctctgcctcctgtctgatcagccatggcattggattcttataggagagtgaaccgtattgtgaacggcacatgtgagggatctaggttgcgtgcttcttatgagaatctgatgcctgatgatctgtcaccgtctcccatcaccaccagatgggaccgtctggttgcaggaaaataagctcagggctccaactgattctacattatggtgagttgtataattatctcattatatattataataataatagaaataaagtgcacaatcaatacaacgtgcttgtggccgggtgcagtggctcacacctgtaatcccagagtgaaactctgtctcaaaaaataaaaaataaaggccaggcacagtggcttatgcctgtaatcccagcactttgggaggccaaggctggcggatcacgaggtcaggagttcaagatcagcctggccaatatggtgaaaccccgtttctactaaaaatacaaaaattagccggacacggtggcaggcgtctgtagtcccagcttcttgggaggctgaggcagaagaattgcttgaacccaggtggcggaggttgcagtgaactgagatagtgccactgtactccagcctgggtggcagagcgagactctgtctcaataaaataaaataaaataaaataataaatataatacacttgaatcatctcaaaaccatctccccactccctggtctgtggaaaaattgtcttccctgaaaccgatcccaggtgccaaaaaggttgggggccactgccttcatcgcctgcccctttgagcctctggtggctgtgggtgtcccttggcttgtggctgcatggcccttaccttcaacaccagcatctacagatctctccgggccccatctccacttggccatccctgtctgtgtcaaatctccctctgcccccgtcttgtatgagcaccgagactgcctttagggaccacctagaccatccagggtgctctcgccacagcaagatctgcaactgaatcacagatgcaaaaactcttgttccaaacaaggtcccatttgcaggtctagggattaggacatgctatccctggggccattattcagccttctctcgtgactatgatccctcccttcctccccagcctcccacctcggctgagatgctgtccccacctccctcactgtctggctgcctgtggggctgtcctccaggctctttgggaggaggtggttgcttgatgtctcccagaaggctgggaatggtcctccccaccccccaggaagatgtcctttctgccaaggagattgcatttggggtcctatcccaggcagagagcggacgggactgtggcctgaagtggcacttcagggcctttggctctgtcatctagccgagggctgtgcatgggcctcacctggtcacaggtaactcacctggctctgtggggcagggattgtaaactcagaggcctgcggggtgtgtcgaggtagaggggtgcaaatattgtaaatttgttgggggccttggggagcagcacagactgaaaagtgttttgtctgaagagcagaactgtcttataccagccctgtgcggccaggcaggaaggcttccgtggtgcggccacgcgtcctccctttctcaacagaagctgacagtctggagttttcagagagattgcctgagttctcagccttggcacaaacacacattctctttaaacaggcttgggccaacagaaccagcctccgtgtctcgggtttgaatgaacccttgaggtgaagcttaaagacagagaggatgcccctgattcccaccccagggacccacattgtaaacccccacctgctctgctgagcccttggcctcagcatggaccctgaccatgtgctggtggggaccccccaggtaagtaagcagcctctgaggaccccggatgaacagtggggaacagcactgatcccccagtggggccccgagttcccggagaggaagactcgctccctcccaggggacggctagagactcactgactcatgcgtgtgtggtaggaatcttccaggaagtccccgtcccgttcgccctctctgcctgggcggggacggcaactgcctctgtcactgcagactaatgggacggaggggggtgacttctcagggttcctcctgggcaggtgctccggaaccttttctcagcacgctggcctggggcacggccgttcctcctgcccagccacgttggggtacagggtgaagaagggctggggccagcccaggacagaggaaggcgaggcaggcacgcaggaactgggctttttaaacccttaagcccaaggaaatcgtagcatcgcgggacagggaaaatgaaagactttggaagtcgtcaggaatttgactctgtgagttggtttccaagagtctaagttaagcatctccaagtggatattaaaaaggagcagcaagcctcggggcggcgggggctggaggaggtggagagaggaggctgccggaagccgcactcgggacctctgcagccaccgaccagaccgggcggccgggactctgggactctcgcaggcagacccggtggtctgccggactcctcggggcccacttcgggccctctctcctgcctcctatttttggatttctctcctttgctccctttttcctcccgttttgaagagacaatgctacttcagtttggagcacaaacatatgatcagcacatggaaatgtggtaattcggatgcattcgtgattgcaacagattgaagaaattagaccagacaaagagtgtttttagaggaggaggaggaggaggaggaggctgagagagggagggcgacgggggtgagaaaggggaggccgcctctgagcgggacgccgggactcccgccgctgctaaatatatccgtaggaatggagagggaccggatctcaggtacgcagacagccccctccccatcggccgccccccactgccctggactcggggctttatttatgcctgggggaataagcatgcaaagggcgcttttgctcatttttcacagaaatatttcttttctttttgacggttccaagctcgtgggatgaactccgtctcagaagctaagctctcctgagtctggcttttatttaaactcggctctcctctctcctggctacttccctttcattttccagtgtgccattcttgcatgtcatggccactgtcaatgctgaggctgttggcgccgaaaccttgggagggtgtgggggacctgcccccctggctcgggtctggggcggcggcgcttggacctggctggtggttggtttgtccactgtgtggtttgttttttgcttccagccaaagtctgtcttcaaggctgcctcggtctcctacctaaaatagcatttctgtgccttcctggcagttgattatagagggggaagctcccggcgctcagaggagcctggcgtgtgtgtgcacgtgtgtgtgcatgtgtgtgcgtgtgtccattcacgctggcagcccccttgccgcaggcacagacccatcagggcgtgaacaggcaaatgaagagaaagggggctcccctgcctttagttcaccccagctttccaggccctccctcccaggcccagcctccttggtcccttcactcacatgcggtgccgtggctgccatctcacgtggccagcgccgtcatcggtaattagcagtgatgacagtttctgccgctcatgccgccctctgagcccagcgctgggagacatggggtggctgagccaagctccaggctttgggtattctgaagtgacctacgggccatggagcgggaggtcgctaagagtgtcaacccctacgtgccttgggccctggtctgttggttgccactatgtgtgtgttggggggtccctgagaggcctgagagagggaggcccatctcggtggctcctctctaggacgtgtggtcccctccaccactgctcccagggccacatctttttttttttttttctttgagacggagtctggctctgttgcccaggctggagtgcagtggcgcgatctcagctcactgcaagctccgcctccctagttcatgccattctcctgcctcagcctcccaagcagctgggactataggcgcccgccatatttttttgtatttttagtagagatggggtttcaccgtgtcaaccaggatggtctcgatctcctgatctcgtgatccgcccgcctcagcctcccaaagtgctgggattacaggcgtgagccacggcgcccggcctcagggccacatcttgattgtcacgttgggactggtggagcgggtgtgtgttgtgccgctgagcacacccagtcgggcacagcaggcggacctcaggagggggccaggggagacggcagaaggcttgggtggcagtgaaactgcatcttatctgtttgagctcgggggctcaggcccgctgggacgggtgggtgtggagcccagcgtcctgctctccgcccagcaggagccgcagggcagggagcgctgagagggaccttcgtcaggcttgcacagtggagccgtcctcggagtgaccaccccaccaggcagcctgggcagaccacagtgggtcccctgcctcctgggccaccagccccaggaggacgtcactccacccgcctggctggcaggggcctcggggagcctcgggttcggccttcactttatagatgatctagccgaggcccagatgggtgaccagcaggggatctgagagctgagcagagaggcgtgggtttgggggtggtgctccctggggagctggaagtgatggcaccctcccaggctcacaaaacacgggcttttcatgaactgaacaaaacactctttgaaagcagccagtgctgtgccccagagaccactctgatccctgctgcccttggctgaggacagcacagccagggatgaagcggggacctcccctcgggctgtgccttgatgaaagatgctttctacaaaatcccattcggatgtgttttcatgtaagaaaacgtacatttttagaaactcagttgtaaactggctgccttccgaatgaacacgacagtcccggagctgtttcccttaatgaggttctcgtcctgggcaaactttagcgctggtctttaattgtcactgaactcccgcacagtccctggggaagtgacttccttcctgtccctgctgggtggccttgagcaagccacttggcagctctgggccgcagttccgtcatctgcaaggtgaggggtgggagcggcacggcccctaggcagcgcccccacctcctgcgggtttctgcgcgtgtcctgagttttgtgggcgcctcttccctcactgaggggctcttcttctctgcagggcatggctcacgccgcgttgtcaggctgcaagccactgcgagagctgctctgatccccaagcatgctctggcctgaggaggagccatggggaggacgctgtgcctgtgtgacagaggcctgcccggcagatgccggcccgctgacttccagacgtggctgtgggtgcctcatgccccactgggctggcgtgtgaggcgtgtccagctcaggctgccctacagctgcccaggaagggtttgtgggagggggtggtcctaccctggtgagtccacggtggtctgccagccccagggaaggcttaggagccccaagacctgccctcttgtccctccctcggcagtgtctggctccggtctggtttgtgaacgggggcctgggtactctcccgccctccctgggggctgtggccttcccctgggaaggtgctggagggtttgtcagcagggccggcatgagtcatggagtggtgactggccgctgaggcatggaaggccactccttccagccaagggtcggagctttttttttgttctggaacggctttgtggcttttacaaattaagcagttttatcttgttccaagagcttgtatttcagcagggagagagtctccaagaagggaactttccactggggagctctgttgggctgggaggctaggaacaggccacgagggagggctgcaggcaggggaagtggccgtctgtgcatggtcatgaatgcaggcccggggtcctggagggggcttggccacgctgtcgctggacgtctgtccccaccagggtccatctgatgcagtacggcacagggtaaagcccagctcctcttacggggttcctgggtcatcagtgggcggggaaccgaggcctcctggagggcggtgcctcagccctcacccctccctcctgtccctcgctgtgctgtccccgatggcctctgccatcccctgggagttcttacccctggacgctcggtgcctgtccggtctcaacctctccagctctgcttttccatctccgaggtgagaggcctggcctgacgcgctctgcacccgcttcctgcccagccccgtgggaactctggtccctgtagtggtttcctggggctgccatcaccaagtgccacaaactgggtggctcaaaacaccagacatttcttctctcgccgttctggaggccagaagtccgaaatcacggcatcagcaggcctggttctttccggaggctccgagggggagcctgcttctcgcctctggcagcttctggcggctcccgaaacccttggcgttccttggctcgtggccacaccactcgacctctgcctccgttgtcacggggcctccttctgtgccctaaatctccccctgtctgtctctcatacggacagtctttctcggatttagggcccactgggtaacccaaaatggtcccatctcaagatccttaacttcataacgtctgcaaagaccctttttccaaataggccatgttcataggctctggggtggatgtaaattttaggggccacctttcatccccctgttgtccccgtgtgtctggatgcacagcatggttccatgtcccagactccttgctggacccctctggccctttggggtggcctttggccttttccactcgtttctgtgctcctggtgaggtgtcggggtcgggcttagcccctgcaggaattctggggacagcatggagccggcaactccccaccaggcgtcttcctacctgcccagagctcatggttgtgaggggtctctccttgtggttttgatttgcaattccccagtggttagtgatgttgagcatcttttcgtgtttattgctcatttgcacatattcttgcagaaatgtctgtccaagtcctttacctgtgtttgatttggatgattgttgttgctgagtgttaggagatctgtagattaatatccagatactaatcccatatctgacctatgatttgctgccattccatggattgccttctccccacgttgttagtgccctttgatatgcaatttttttttttttttttgagatggagtctgactctgttgcccaggctggagtgcagtggcatgatcttggctcactgcaacctccgcctccctggttccagcgattttcctgcctcagcctcctgagtagttgggattacaggcacccgccaccacacccagctaatttttgtatttttagtagagacggggtttcactgtgttgactaagttggtctcgaactcctgacctcaagtaatccacccgtctcggcctcccaaagtgccggagttacaggcgtgagtcaccgcacccaggctgatatgcaaatattttaaacttctatgacgttccactttatctatttgttcttctgttgcctgtgcttttggcgccatatccaagaaatcattgccaaatgcaacgtcaggaagcttttcccctgtgttttcttctaagagttttgtggttttagctcttgagtttaggtctttgatgcaagttgagttgatttttgcatgtggtgtaagggctggtccagcctcatgctctgggctcttgattcacttctcttcttttctcacgcccagctggttccgctgggtggcggggaggagtggggaagtcccgggctgggcctgcactcgatcatcccctctcaggccagccagggagtctcagctcctgcccaggacctggctggacgtgctccctaccgggaaagcctgggccgtctttctaggctgatggcagggccagcccggggcgtcctgaggcctgccctgcggacatgccccttgttctaggtggtgtggctgcccggcctgcgtgtgagaccagctgtctgtgcttcaggccatggaggctgagtgtttccagcctgtccccttgctcggctctccctctggggaagcccctgcagcccattctctgcctccgcttctgccatctgtgcctttgtctgcttcctgtttggaggtggtcatccctggggccacccctcatgatctggacacaagtctccatcctgaagccaccacccaaacccctgtgcctcaaacccctcccacccaccacatgggtttccactgtgaccaactcagcagctgatgaagcttcccttggggctctcctagcaacggggagctggctttcccggaggcctggcctctccctaagtggaagtggggcgtgagggtgtcagcctttttctgctgcctggtgctctaggttggcttgtcacccctggaagcacttgccatccttatacagcaccccacacccacctccccgcctcctaccccttcttccaaggggtcatctctgcttccctccccacccaacctcacccatgtggtccgcccagcaacctttgacccccaacatgacaaaataaacctcccttgccggtcactcattcattcattcagcattgggtgctccctgtggacttggcgctggggtcccgtggaggacaaagccagacacagtccttgccctcatgggactgcacaagtgcaagaccacatcagtaaacgtgaaacacaggaagtgacaggtgtgacaaaggggaccagtggcaggacagaacctgcggttcgtaggaccaggtcaggagggctgcctcggggggacaccttcgggctgagcgcagaaggatgaggggagtaaaccaggctcaaacccagcaggcagaggcgatcgctgcaggcaaccggcaatgtgttcaaaggccctggggcgcggggggctgaggccggcagcacggcaggaagtaagactggggttgaaagagactgactgtcatgttgtgaaatatacacttggttttcatctccatttcctggcacacaactcctaaaatccttggaatctccaaagtgatgtctttttggatgctcatgattgacagaccagctggcagcttcaggatggttcccagggaagaccaggtagaatcacaaggttcagcaccaccccgcaacctccaggtaggggagaggggctgaaggttaagcagatcatcagcggccaatgattgaatcaatcatgccttcgtaatgaggcctccgtgaacactcagaaggatggggttccgggagcttctggatggatgagcatgtggaggctcctggagggtggagcgcctggggagcacatggaagctctgcgtccctcccccataccttgccctacacatctcttcccctgtatcctttgtaatatcctttataataaactagtaaattccatgagccccaggaacatgtgtaaaagaaaaaaaaaagaataaaccatagctgctgtagcaagttaatcctaccagcactggctctcatctgccgaccttacctctggcaatgcctccctctcctgggctcctgggacccctccggccccaccacccctcctgtagtggtctcgctggctgctgccctcaggttagtttatttttacccggcctgctcccaccaggggctgaggcctccttgctcactccagcttcctggcccgtctcttgctctgggcacccccccactccgaacggccagagcttctgaagccgctcgctgtgtgcccccgcctggccccatgcatcccgcacggtgctccccagggtctcccactggcaagggcattggcatagattctggggctgccttggttcaagcccaccctgacttggagcctgagggtccctgagggggtcctgaaggccagggcaggcaaggctggcatgctctgggcagtgggggctgggtatgggaggggatcgtgggtggggagattcctcttaaccagcggcccacgtttggagactgatttgggctccaggctacgccttgaaattgggacagagagtggcgcagatctcagcccggagactccctctgcctgtggacgccctcatacctccatccgtggagccaccctcctctttttttttctaaatggggaaactctgacttgaacactgaataaacaacacaccctcgaaatcagcgaagaggcactggctctgaaactttgccatgaaagcttgaaaatgctctttggaccgatttgctggaacagacgggtgtgatggggctgcggggtttcaggtggcaggaggcgtccccgtgcctagggcatcccgatgctcagagtttccccgtgcccagtgtgtccctgtatccagggcatccccatgcccagggtgtccccgtgcctagtgtgtccctgtatccagggcatccccatgcccagggtttccccgtgcccagggtgtccctgtatccagagcatccccatgcccagggtgtccccgtacccagggtgtccccgttcccagggcgtcctgtgcccagggtgtccccgtgcccagtgtgtccctgtatccagggcgtccccatgcccagggtgtccccatgcccaggcactgcctctccccactttcctaatctccctccaccaacaggtgtcagctgtgaaatgcctgctgtgtgtgtcctttggttgagttcatcttgtgctcttaagttcctgttagacacaggcaggctgctttagttcttctggcaaatgttttgttgttgttgtttgatacggggtctcactccgtcacccaggctggagtgcagtggcgccatctcgcctcactgcaacctccgcctcccaggttcaagcgattctcctgcctcagcctcccaaatagctgggatgacaggcgtccgccaccatgcctggttaatttttgtatttttagtagagatggggtttcaccatgttggtcaggctggtcccgatctcctgacctcaagtgatccacccagcttggcctcccaaagtgctgggattacaggcatgagccaccgtgcctggcccgtctggtgaatgtttattgaggcctactatgtgcagcccctctcttaggtgcttggcctgtaatgaggagcaacaaagacacagtcgctggtcgcttgttacttaacagttggaactgagaggcagtccacaaatgagcaaatccataggtggttttagatgaggactgtgaagaagctaagaacaggttgctgggggtgcatatctgtgtgtgtggcgaggggattaatggaagccctttctgagtggtgacactgagctgaagctgtaatgaccagaaggacccagccaggccaaaatccaagggaagagcaacctggcaaaggaaacagcaggtgtgaaggcccgaggctggagcctggggaaggtgggagtggctggagtgtgttttcagagacgggccatggtgacaccaatgcgacaggcagggccaggtcgtgccgggccttggaggccctggtgagggcttgattttattctcactatggtgggacctcagtgccctgtggctgctgagaatggccaggggcaggcagggaggcctgctagggaggaggctgctgcaggccctgcagctggagagggaggatcaggatctctttagagaggaagttggagagggaggatctctttgattgctggatggacccacctgcctggctgcccccgtcagcatccagcagaggccactggatgctgacaggtggccggccctgcccagccttgcactgccctgtgctgccctggtggctgccggctttaggaggagcgcttttggtgtctgagcccagtggtcctggctgtggtttggtacacttggccgtgggtgaggccaaggtggtttggatcctgggaaggttgggtacctggcagcctcaaggcaggagctggggtgttggaggaggaagcacgctcatccctcgttccttcctgtttcgtgggatgctgagtctctgggcagggacatggtgagccctggtgtgatgcacttaacacctgctggtgcccccatccccaagcaggaaccctggtgcctggtgcctgaggactgctgtccaccgtcccaccatccttcaggtttcttcccagcctctgactcggggcaaggttcagatatccagaacattcttggctggctcttggagctggggtgaggcagaacctccctcccatatttacagcaccagccaaggcttcggggtttggacaccatccctgggaggggtgagcaggacaagtgaggtctccagacttggggtggcttcggactggccaggcaggtgggtgggggctgcagtccatgcccccgctccaggcaacacagtcgagctgcagcccccgctccatccccagctggggctccctgtgctcaccttctgcttccttcctctccctcggaatggggggtggacactccaagactagcctcccagccactctccctgcctcctgcctcctctccttcgggacagacccctgtgatcgctgggtgttcctgatgctctgtcccctctgcgtcctgtgccgtgggtgagagagggcttcggggggacttccccctcttggagcacctgctgctccgggtgcctctgggggcgggcccccacctcacattgtggagctggtgtaggaaggaaggtgccgggagccagctccaattcacgtgctggctgtggccctcaaggtgtggatggcaggaggtggtgagacagggactcattgatcatgggactgacaccccctcatgttgatgtgggccctgagccataatctcaccagctcctgagttttggcgctgctcttggcgatggcgtggactcagccaggctctcgggcagcctttcctggattcttcctccgttctcccctgggcagtgtttctgttcacctggaaaggatgggtaggacttggagacaacagggattcaaagaagtcgggagtgggggcacctgtgcagctcaccctgcagaacagacaatttggttaaagcctaaagcctgctgtcaggagcctcgcttgcctctcagagagcacatggcttgaccatcacggggactgggggagaggcacaggcatgcctgtccggcagcagaagggaaccccgggcctgggcctctccattctgtggcgttgtctttcctcagagttgcactgtctccttcactgtccctgcctggccccagtgctcatgtggcttgtggccctcagtctgggcttggtctcccgcaattcaccctgcccagccccacacagcttgtccctccagctgggaatcggagctcacctggagtcccaggcagcagattcgatgcagtgatgcagggctgtcagccatgccagcaggccctgctgctcacagagggatgggtattgctgttgacaataattaaagaactacggcttcaggctgggtacagtggctcacacctgcaatcccagaactttgggaggccgaggcaggagaatcaattgaatccaggagttccagaccaggctgggcaacatagcaaggctttgtctttacaaaaaataaaaaataataataataataaaaactacagcttcagaatgattgacttcagcatgtttataaagtcaagggtcttcagtgtcctgggcctatgtcactgcgtcagagggagagaggaagaggctggggtgatgggcactggggcttatgctcctcctggaatgggtggtcttggactgtgcctgtgtgatatgtttgtcgagcgggggcggtgtccactgaggactggatgttgaggtgtgggtggggggaggttatgaagcactgggcatttcccgtgcaccagtgccccgagattgcagagaggggacccgcccagcctgggcagggaggcgggtggcagcgaggaaggggagaggaactcgggtgcagaaagcctttcctccagcaggtggcgccgcaagctctcgagagtccagctcctgcggggtttgcattttcactgaatttgtgggcagaggctgcctgggtgtagtttccgccaactgtgactgctcactgcgggcgaggggaagtggagtgcagagaatgcaccggagggcagatgaccagcccccgcacaggcacgggggtgcctccttccccgcacaggcacggggggcccgagcccttggggttcctgtcctaactgggcggggaaagggagggttggaagctgagttagggggaaagggggtggtctcctgccatctcttttattttatttttcctatttttggttgataggtttcaatcttttttacatttttccaactttttgccgtaaaacttttcaaacatagaaaagatgaaagagggctgagtgtggtggctcatgactgtaatcccagcactttgggaggttgaggtaggaggatcacttgagcccaggagttcaagaccagcccgggcaatatagtgagatcccatctctataaaggatacaaaaaattagtcaggcatggtggtgcaggcttggagtcccagctactcggaaggttgaggtgagaggattgcttgaacctgggaggttgaggctgcagtgagctgggattgtgccaatgcactccagcctgggcgacagaacaaaaccctgtctcaaaaacaaaacaaaacaaaaccacaaaaaagaaaccatgaaagattctaaagtaaacacccatgcacctaccacctagattccacagcaaccattttgctgtttgcttcaccacaaatccctctggccaccagcatccacgctggttttgatgcacttaaaataagctgcagaaatcagcacacaacatcctgtcaacacctcagtttgcatttcattaactagagtccggcatttgtctgtgattatttttgtttttctttgaagtaaaatgtatataccctgagatgcacaggtgtgaaacgttccgttctttgaattttaacaaaggtatccacgtgtatcccagcctgaccagaacatagaacatcactatcaccccagtaagttcctcatgcccctccaggtgcatcacagtccccaccttccccagggcaaccacaattgtgctttttttccaccacgaaataattttgccagtttgagtgtttcttagagctacccatgttgctgcaggtgccagcgatttgttctgttttattgctgagtaacgtccactgtgtgaacattctgtgggtttttagtcattctcttgttgaaagacccctggctgtttccatctggaggctcttatgagtaaacctgttacgctggttcttcttgtacaagtttttctgtgcatatgggcgttcatttattctgtagaaacacctagagtaggtatagggtaggtatacatttagttttataagaaactgccagatcttttcccaaagtggcccttccatttcacactcccaccagcaatggatacgagttctagttgctccacatcctggccaacatttggtgctgtcactctgtgaaatcttagtcattctggtgggcgtgtagtggtatcatctcattatggctttaatttgctttggcctgatgactaatgcggttgagcacattttcatgattggctcttcatatatttttcctttgtgaaatgtcttttcaaatctgttgctcattttaaaattgggttgcttgactttttcttctggatactgatcttttgtcagatacgtgttttacaaatattttattccagtctgtggcttgcctgttcattttctttcctttttcaagaacaaggtctcgctgtattgcccaagcaggtctgaaactcctgggctcaagctgtcctcctgcctctgcctccccaagagccggttttacaggcatgagccaccatgcccggcctgttcattttcttagtggtattttccaataagcaaaagtgtgtcactttaatttttatgaagtctaatttaacaaactcctttctttgtggttctctctctgtgttctttgtaagaaacctttgcctaccctgccaaattgcaaagatatttatgttttcctttagaaggcttagagttatatagcttttatgaattaacttttgcatatggtgtgaggtagagggtcagggttcattttgttgtcgttttatgtgtttattcagttgttccaaacttcatttttttttaaagcttttattttgtattttcttggtgacttatgaggtcgcacaattttccaagatccttgttggtcatttacgtattttcctttgtaaaattatctgtccacgtcttacttctttttaaaattatgttgtttcaagatcgagtgatttctgaagccttcattttataatgcttgaaagaatgaacaccttgttccccagctacaggcttctgctctttgtcctgcagctgcacagtggggtaagacttgggttttgttttgttgctgctttgttgtttcttcatttgactgtttccccatgggtctcatttaaaaaaaaaattggccgggcacagtggctcacgcctgtaatcccagcactttgggaggccgaggcgggcagatcacgaggtcaggagatcaagaccatcctggctaacacggtgaaaccccatctctactaaaaatacaaaaaattagccgggcgtggtggcgggcgcctgtagtcccagataatcgggaggccgaggcaggaaaatggtgtgaacctgggaggcggagcttgcagtgagccgagattgcaccactgcactccagcctaggtgacagagcaagactctgtctcaaaaaaaaaaaaaaaaaaaaatgttgtttcatatgttttttatatattctggatataagtcctttatcagatatatgtatcataagtttttttttccacattgctcctttccttttggttttcttaatgatgttatttaatgagcaagagtattttgttttcataaagtccaatttatcaactttttccagtttcgatttatgatttttgtgacctatggaggaaatctttgcctacactaaggtcaaaagaagttctcttattttctagaaattttatagttgtatattctatgattccttttattttttaattttttaaatttttacattttttaacctattatagccgtcaggatgttgtatgatccattttaaatcagtttttgtatttggtttgaggtcagggttaattcttgtttttctatactcatatccagttctagcaccgtttgttgaaaagacataccttactctattgaattacctgacacctttgctaaaaatcattgactgtatatgtggccctatattagtatatgtacgtatatacatgtaggccctgtgttgactgtatgtgtggtcctatattagtatatgtacgtatatacatattggccctatgttgactgtatatgtggtcctgtattagtatatacatatcagccctatattgactgtatatgtggtcctgtattagtatatgtacatatatacatgtaggccctatgttgactgtatatgtggtcctatattagtatatgtacatttatacatgtaggccctgtgttgactgtatatgtggtcctgtattagtatatgtacatatatacatataggccccgtgttgactgtatatgtggtcctgtattagtatatgtacatatatacatgtaggccccatgttgactgtatatgtggtcctgtattagtatatgtacatatatacatataggccccgtgttgactgtatatgtggtcctgtattagtatatgtacatatatacatgtaggccccatgttgactgtatatgtggtcttgtattagtatatgtacatatatacatgtaggccctatgttgactgtatatgtagtcctatattagtatatgtacatatatacatgtaggccctatgttgactgtatatgtagtcctatattagtatatgtacatatatacatgtaggccccatgttgactgtatatgtggtcctgtattagtatatgtacatatatacatgtaggccctatgttgactgtatatgtggtcctgtattagtatatgtacatatatacatgtaggccctatgttgactgtatatgtggtcctgtattagtatatgtacatatatacatgtaggccctatgttgactgtatatgtggtcctgtattagtatatgtacatatatacatgtaggccctatgttgactgtatatatatatgtggtcctgtattagtatatgtacatatatacatgtaggccccgtgttgactgtatatgtggtcctgtattagtatatgtacatatatacatgtaggtcctatgttgactgtatatgtggtcctatattagtatatgtactgtatacatgtaggtcctatgttgactgtatatgtggtcctatattagtatatgtactgtatacatgtaggccctgtgttgagacactattgtgttttcttgatattttgtccattcctttgctgatgccacatcttgattaatgtggctttacagtaagtcttaatataaagtctctcaaatatctaaaatattactttgaatattctaggtcctttgagtttccttataaatttaagaagtagcttgttgatgtctacaaaaatgcagtgtgaattttggttgagattgtgttgaatctgtagatcaattaaggaagaattggcattttaacaatattgagtcttttgtatagatggtatatctccgttttaaaggtccttttgtatttcttttatttctctactgaaaaaaaatctctacagaattacattgttttgtagttttcaagaaaaagatcttgcatgccatttgttaaatttattcctaagaattttacttttggcactattttaagctgaaatagattttaaatttcatttttaattatttgctgctagtatgtaaaaatacaatagatttttgtatgtaaatcttatatcctatgatcttttccaaagtcatttattactctggtaatggttttgtaggtcttttaggatttaaatacatagttttacttctttctgatcttgatgccttgtttttttttcttgctttattgcactggttagagctgccagttcagtattgaatagtagtgattagtggacatccttgcctgtgccaaacttataatgttaactttagatttgtcatatatgacctttgtcagattgaggaaattcccttctattcttaatttgctgaaattttttaacatgaatgggtatgattttagtaaatgctttttctgcatctatggaaatgatcattgttttgtcttttattcgtttaataggataaattacaatgattgatttttgccccccgttttttttttttttttttttaaagaaacagagtctcactcttgcccaggctgtagcacagtggtgccatcgtagctcactgcagcctgaactcctggacttaagcaatcctcccacctcagcctcctaagtagcagggactataggcacatgccaccatgccaagctaatttttaatttttaaaattttttgtacagatggggtctcattgtgttgctcaggctggtctgcaattcttgagcttaagcaatactcccacctctgcctcccaaagtgctgagattacaggtgtgagccactgtgcaggcctgattttttaatattgaaccaaccttgcatttctggaagaagtccaacttgcttatgagatatcatcctttttatatattgctaaatttgatttgcccagtttttaaggatttttgcgtgttgattcatgagggatattggtgtggtattttctttgtttgttagtttgtttcggtaatgtctttgtcagcctcattttggcttcataaaattagtttggaagtgttcccttctctttgttttctgtgttttcataaggttgatgttgtttcttccttaaatgtttgatagaatccaccaagaaaaccgtctggacctagaattttctactaggaaaggtgattgtttgtttttaatcacaaattcaatttaatgtatagaaagagttattcaggtttttttacttccccttgtcttacttttggtaagttgtactttgaaggaatttgtccctttcaggtaagttgttgaatttactcatttaaagttgttcgtaatacaagcatacctagggtttgcttccagacctcggcaataaagcaaatattgcaataaagcacgtcacacaaactttttggtttcccagtacatataaaagttatgtttaggccaggcatggtggctcatgcctgtaatcctagccctttgggaggccaaggtgggcggatcatttgaggttaggagtttgagaacagcctggccaacatggtgaaacctcatctctattagaaatacaaaaattagctgggtgtggtggcacatgcctgtagtcccagctgcttgggaggctgaggtgggagaattgctcgaacctgggaggtggaggttgcggtgagctgagatcacaccactgtactccagactgggtgacagggcgagactccatctcaaaaaaaaaagaaaaaagttatgtttacactatactatagtctattaaagtgtataagatcattatgtctttttgctaaaaaatgctaataatcatctgagccttcagcaagccataatctttttcttggtagaaggtctgcctcaatgttgatggctgctgaccaggtggtggttgctgaaagttgaaggtagctgtggcagcagtttctttgtttcttttttctttttctttttttttgagacagagtcttgctctattgcccaggctggagtgcagtggcacgatttcagctcactgcaacctctgcctcccgggttcaagcaattctcctgcctcagcctcccgagtagctgggactacaggtgcctgccaccacgcctggctaatttttgtatttttagtagagacagggtttcaccttgttggccaggctggtctcaaactcctgacctcaggtgatccacctgccttggcctcccaaagtgctgggattacaggcgtgagccactgcacctggccggcagtttcttaactgaagtttttgacatgggttgactctttctttcatgaaagatttttctgtggcacgcattatgtttgatagcatcttacccacaatagagcttccttcaaaattagagtcaattctttcaaccctggccacggattgatcaaataagttgatgtaatattctaaatcttttgttgtcatttcaacaatgttcacagcatcttcgcctggagtagatcccatctccaggaaccactttgtctgctcatccataagaagcaactcctcatctgttcaagtttgatcatgggattgcagcaatccagtcccatctccaggctccacttctaattctagttctctgctatttccaccacatctgcagtgacttcctctgctgaagtcttaaaccgctcatccatgagggttggaatcaacttcttccaaactcctgttaatgttgatatttcaacctcttcttgtgaatcacaagtgttcttaatggcatctagaatggggaatcctttccagaaggttttcaatttactttgcccagatccattagaggaatcactaactatggcagatactgctttataaaatatatttcttaaataataagacttgaaaatcaaatttatcccttctccatgggctgcagaatgggtgttacattagcaggcatgaaaacaacattcatctttacatacatctccgtcagagctcttgggtcacaaggtgcattgtcaatgagcaataatattttgaaaggattcttttttcctgagcagtaggtctcaatgatttttttttttttttgatggagtctcgctgtgtcacccagaatggaatgcggtggcatgatctcggctcattgtaacctctgcctcccgggttcaagtgattcttgtgcctcagcctcctgagtagttgggattacaggcacacaccaccatgcttggctagtttttgtattttttgtagaaacagggtttcaccatgttggccaggctggtctcgaactcctgacctcaggtgatccacctgcctcagcctctcaaagcattgggactacaggcatgagccactgcaccgggccctatttgttttttttttgttgttgttttttaattgagacagagtctcgctttgttgcctagactggagtgcagcagcgctatctcagctcaccgcagcctccgcctcccaggttcaagtgattctcctgcctcagcctcctgagtagctgggactgcaggtgtgcactaccatgcctggctaatttttgtatttttaatagagatgaggtttcaccaccatgttggccaggctggtcttgaactcctgaactcaggtgatttgcctgccttggcctcccaaaatgctgggattacagctgtgagccaccgtgcttggcccttttttgtttttttgttttttttcaaattgagacagagtctccctctgttgcccaggctggagtacagtggcacgatctcggctcactgcaacctccgcctcctgggctcaagcggttctcctgcctcagcctcccaagtagctggaattacaggcgtgtgacaccatgcctgaataatttttgtatttttagtagagatgcggtttcaccatgttggccaggctggtctcgaactcctgacctcaagtgatccccccgccccagccttcaaaagtgctgggattacaggcgtgagttgccgcaccaggcctcaatgggtttttaatattcagtaaaccatgctgtaaacagatgtgctgtcaagtagggcctgttattccatttctgaagcatagacagaatagatttggcagaattcttaagggccctaggatttttggaacggtcaatgagtattggctttaacttacggtcaacagctgcgttagcctctcatgagagtcagcctgtcctttgaagctttaaagacaggcattgacttctcccctctagctatgaaaatcctagatgacatcttcttccagtagaaggtgggacatctatgctgaaattctgttgcttagtgtagccaccttcatcagtgctctgagctagatcttctgggtaacttgctgccgcttctccatcagcacctgctgcttcaccttgcacttttacattatagagatggcttctttccttaaacttcatgacctgacctctgctagcctcaaactttccttctccagcttcctcacttctcttagccttcataccattgaagagagttagggctttgccctggattaggcttttgtttaagggaatgttgtggctgatttgatcttctatccagaccactcaaactttcttcatatcagcattaaggctgttttgctttcttcttcttcatgtgtgcactggaatcgcacttttaatttctttcaataactttttcttggcattcacaacttggctagctatttggcataagagatctcacttttgcctgtcttggctttcgacacgccttcctcactcagcttaatcatttctagcttttgatttaaagtgagagacgggtgactcttcctttcacttgaacacttagaggccattgtagggttattaattggcctaatttcaatattgttgagtctcagggaatagggatgcctgagcagagggagagagagcggggaacagccagtcagtggagcagtcagaacatacaacgtttattgaataagttcactgtcttatctggatgtggctcgtcatgccccaaaaacaactgcaataatggcattgaagatcactgatcactgggcgcggtggcccatgcctgtaatcccagcactttgggaggccgaggcaggtggatcacctgaggtcaggagtttgagaccagcctggccaacatggtgaaacctcgtctctactaaaaataccaaaattagccaggcgtggtggcgggtgcctgtagtcccagctactggggaagctggggcagaagagtcgcttgaacctgggaggtggaggttgcagtgagccgagatcacaccactgcactccactgcactccagcctgggcaacagagcgagactccatctcaaaaaaaaaaaaaaagggccgggcgcagtggctcacgcctgtaatcccagcactttgggaggccgaggcgggcagatcatgaggtcaggggattgagaccatcctggctaacacgatgaaaccccgtctctactaaagatacgaaaaaaatagccgggcgtggtggtgggtgcctgtagtcccagctactcgggaggctgaggcaggagaatggcgtgaacccgggaggcggagcttgcagtgagccgagatcgcgccgctgcactccagacagagcaagactctgtctcaaaaaaaaaaaaacaaagaaagaaaaaagaaaaaagagatcacagatcaccatagcagatataataataatgaaaaagtttgaactatttcaagaatcatcaaactcctacacagagacacagtgttaacatgttgttggaaaaatggtgccagcagacttacttgatgcagggctgccacgaaccttcaatttgtaaaaagtgcagtatctgtgaagcacaatgaaatgaggtgtgcctgtgttccttgtcactgtaatgtcggtaggatccgtaaggaaaacacttcattccttttattgtgactttatgttcgccatctccctctcatcagcagcctggctaggaggttatcaatctagatctttttaaagaaccagcattggactccccttttctggtgtccatttccttgagtttctctgttatcttcattacttccttccttgtacttgcttcagcgcattagtcagggcccagtcaggaaacaaaaaccacaccggcaatttgaatagcaacttgtaatataaagtgttcttaactgtaagaggtagttaactattaaagggatcacaaaggggtgacattgtgatataagaaagatgtatttgggctgggctcggtgcagtggctcatgtttgtaatcccagcactttgggaggctgaggcaggcggatcccttgagctcaggagtttgagaccagcctgggcaacatggtgaaacctcatgtctaccaaaaatacaaaaaattatcctggcgtggcggtgtgtgcctgcggttccagctacttgggaggttgaggtgagaggatagtttgagcccgggaaggcagacgttgtggtgagccgagattgcactactgcactccagcctggatgacagagggagactctgtctcaaaaatcaatgtatctgtctgtctgtctgtctatctatctatctatctatctatctatctatctatctagtctctgtcccccaactttgtttggcatgtagctcctaaaactcttgaaatctccaaagtgatgggtgtctttttgtttgctaaggaggcgactggtggctggaggctcctggacagcctggggataagggctggttgccaggggacccagccttgtgattagaaggctagaacttgcagcctttcccatccacctcctgcgaggcaagaggggatgaaggttgagttgatcatcaatggccaaagatttcatgtcatgcttatgtagtgaagcctccctgaaaacccaaaaggatgaggtttgtagagtttcaggttgttgaatacctgcaggtgctgggagggcagtgtaccctcccgtggaagctccatgccgcttccttcatacctttcttatgcatctcttccagttggctgttcatttgtatcctttgaaatatcatttgtaataagtcagcaattttaagtaaactgatttcctgggttctgtgagtcactcaagcaaattattgaacctgagaagggagttgtgaagacctcaaatttgtagccaagtcagacagaagttatgggtaacctggtgtcttaccacttgcgactgatctctgaagttgagggcagtcttgtgagatggaacccttaacctatgggatctgcactaactctggttggtgtcagaattgaactgaattgcaggacacccagttggggactgctgagtattggagaattgcttgggggtcggcgggaggaaaccacacatctggtgtcagagctgaagcactgagtgttgtgaatgagagtggagagatagagtttgttttgccttatgcaagaggactctaaggagtatagaaagagcaaatatgagaagcagctactttagaagaaaacataggaggaaagcttcgtgacattggagttggcaatgctttcttggatgtgacaccgaaaatacaacaaaagaaataaatgataaattggacttcaccaaaacttaaaacttttgtgcatcaaggaatactaccaatggcgtgaaaaggaaatccacagaatggaagaaagtatttgaaaatcgtatatccgataaaggactagtatccagaatatataaagaactcctacaactaagccacaaaacaaaaaaaaacaacccagtgaacagacatttttccacagaagacataccaatggccaagaagcacaggaagagatgcgcagtgtcactaatcatcagggaaatgaaaatcaaagccacaataaaatatgatttcacaccctttaaggtggctgttagccaaaacatggataacagcaagtgttggcaaggatatggagaaattggagccccgtgcactgctggtgggaatgtaaaatggtgcagctgctgtggaaaagatataacaattgctcaaaaaattaaactcagaatgaccataacatccagtgattccacttctagatgtatactccaaagaactgacagcagggacttgaacaggtgtgctacattcttgtttgtagcagcacttttcccataaccaaaagatgcaggcaacccaggtgtccaccagcggatgaatgaacagacaaaatgtggtccatctgtacagtggaatattattctgccttaaaaaggaaggagaggccaggtgtggtggctcacgcctgtaatcccagcgctttggaaggccgaggtgggcagatcacttgaggtcaggagtttgagactagcctggccagcatggcgaaaccctgtctctgctaaaaatacaaaaattagccaggcatgggggcatgtgcctgtaatcccagctactagggaggctgaggcaggagaatcgcttgaactagggaggtggaggttgcagtgagccgagaccatgccactgcactccagcttgggcgacagagcaagactgcctcaaaaaaaaaaaaaaaaaaaaaaaaaaaggagattctgacacatgctatagcatagatgagccttgaagacatgctaagtgacagaagccagacatgaaaagacaaatactgtatgatttcacttttatgaggtccctagagtagtcaaattcagagagacagaaagtgggatggaggttgccagaggctgggggaagggagaatgaatgggaagttggtgtttaatggggatagaattgcagtttgggaagatgagatggatggtggtgatggttacacaacagtgtgaatgtgcttcatgccaccaaactgcacacctgaaaatggttaaaatggtaaattttctgtgatggatactttaaggcatgtatgcaaacacacagaagcagttactaccactggggttgatggaaaagaaaccaagaactcggagcgtcctccacaccttgccacgtcttacgttcaggccttgttggagagtgtgtgactgccacagaaacctgcagcctactggtaacaaaaaggttcttgccagaaggtgtagaaagagtggatctgcaggatcagcttactgggtagccgagaaacctactagagggtatgggtgggcaggagctgggtgtctgagaagtttgctgaggtcccattgggctagagctggggtgctggagaaactcagtacagagcaggccccactgggcacacgccactggcagctgtgccttcagaggaaaaagagaccctggaaccaggaagagaagctgctacctcagcaaggcctggcagctccccacagtgttgtcccctgtggatagagcctgacatgactgtatttggccaaggagaaagactcataaggcctcggtccagtatcacggagcggggcctggcaggatgtatgcagagttaagaggcaatacatgggtaactggcatatttttccagattctttgttttttttgttgttttgttttgttttgttttgttttgttttgttttgagagagcatcctgctctgttgcccaggctggagtgcagtggcatgatctaggctcactgcaacctccacctcccgggttcaagccattctcctgcctcagccttctaagtagctggagatgcccaccatgcccagctaatttttgtatttttagtagagacagggtttcaccatgttggccaggctggtcttgaactcctgatctcaggtgatccacctgccttggcctcccaaagtgctgggattacaggcgtgagctacactgcacctggcccatttttccagattcttaaagcagatccttaggtctttttttttttttttttttttttttttttacttcttttctaatataagcacttacagtttccctctaagcactagcttcagcctacgtattttagtatgctgtgttttcattatcatttcatttgaaatattgtaaaatttttcttgtgatttcctctttgactcatgggttatttagaagtatgttgtttaatttgcaaatagtcaaggctcctctgagtatcttagagctattgatttctaatttaatcttactttggccagacaagcatattttgcatgcttttaaaatttgagacttatggcccagaatgtgtatcttggtgaatgcactgttttcacttgagaaaaaaatatgtatatatattctagacttcctgagtatagagctttataactgctgattaggtcaattgctagttaccagtgttcttcagattatctgatgcttgtttctcagatgttgagagaatggtgtttgctatggcctacctgtttgtgtcccccaaaattcatatgttggagcttaatctctggtgcagtggtgttgggaattggggcatcagggaagtattggctcatgagggcagagtcatcgtgaatgggattagtcccttctgccatgtggggacacagcaggaaaaggacatctctgaagcagggagctagctctcaccagacactgagcaccctgattttggacttcccagcctctagaactgtgagcactacaatctgtttataaattacccagcctaaggcattttgttttaacatcctgaatgaactgaggtggtgttaaaatctccaactatgcatccaggcgcagtggctcacacctgtaatcccagcacttcaggaggccaaggcgggtggatcacctgaggtcaggagtttgagaccagcctggacaacatggtgaaaccttgtctctactaaaaatacaaaaattagctgggcgtggtggcaggctcctgtaatcccagctactcgggaggctgaggcaggagaatcgcttgaacccaggaggtggaggttgcagtgagccgagattgcaccattgtactccagcctgggcaacaagagtgaaactccgtctcaaaaaaaaaaaaaaagagtctccacctatgattgtggaattgcccatttctccctttaattctttcaggttttatatcatgtattttgaagctcctttggttaggtgcatacacatttatgattataatggtgtctcgatgaactgatcatttaaccatgatgaatgtattcctttatctcgtaataattttatcttggactcaactttattgatatttatgtagcctctccagccttcttaaacatgctgtttgggatgcataagaaggctggagaggcttatggagaaacttatgatggtttgacttacagtttttcaactttaccatggtgcgaacgtggtatgtatacagtagaaactgtactttaagtatgtgtgaaaccattgtgtttctcactttcagtacagtattcaataacttacatgagatagtcaacactttattataaaataggctttgtgtttgttgattttgctcaactgtaggctgaagtaagtgttctaatcatgttaaggtaggctaggctaagctagaatgttcggtaagttagatgtattaagtgcatttttgagatgatatttattttccacttatgatgggtttgtcaagacataactccatcatcattcaagcagcatcagtatgtctttttccaaacagaaaatttcaacctgtgtttatactgaaacagcatcttttgtagatagtatatagttgagtcttgctattttattcattctgacagcctccgccttttaattggaatattcaggctatttctgtttaacatagttatagatatgactgggtttagagctactaccttgctctttgatatttatttctttcatcttgctttcttggcttcttttatgttaattaagtattttttagaattctattttaatttatgttttttttttttttttttttttaagacagagtctcactctgttgcccaggctggagtgcaatagcatgatcttggctcactgcaacctctgcctcctgggttcaagtgattctcctgcctcagcttccctagtatactgggattacagacgcctgccaccacggccggctaatttttgtatttttagtaaagacggggtttcaccatgctggccaggctggcctcgaactcctgacctcaggcgatccgcccaccctggcctcccaaagtgctgggattacaagcgtgagccactgagcccggcctgttttgactttttaattgtatctctttgtattgctattttagtagttactttatagattctattgcacattcttagcttttcacagtctacttagaattaacattgtttttcttcatggaaaaaaagtgtaagaactaggcaatcctatgggttcatttaccactttccatcctgtatgtgatggttgttagatatttactacatccatacacattgtaaactagacaatacaataaggaaatttttgctttaaacagccccatgcattttaaagaaattaaaagtaaaacagaatcttttctatttgcccatgtatttgctatatcctgtgctcttcattccttcctgaagagctgagttcccatctggtctcatttcccatgatcttggagaacttgcttcacggtttttgtagtgcaggtttgcagacagctaattccctttcattttcacttatctgcaaatctttattttgctgtcattctttctttttttatttttatttttatttttgagacagagtctcactctgtctccccacaggctacagtgcaatggtgtgatttcaaaactcctgcccaatctcaactcaccaaccttctcctcccgggctcaaacgattctcctgcctcagcctcccaagtagctgggactacaggcatgtgccatcatacccagctaatttttgtatttttagtagagatgggatttcaccatgatggccaggctggtctcgaactcctgacctcaagtgatctgcctgctttggcctcctaaaatgctgggattataggtgtgagccactgtgcccagcctgctgtcattcttgaaccataatttcactggttatagaattctgagttgtcagttttttctttcaggactttaaaatatagggttccagtgtctttggcctccgttgtttctgtcaaggaatcagcattcatctagctattcccctgtagaccacatgttgtttttccctggatgcttttaagactttttatccaagtttgattgctcagtacctacctctgggcaaaaaagcctccagaaaccagaaacttatctagttttattcccctctgtcaggtgtagactctactccagcttctacctacttgagatattctatactgactccaggctgttgttattttgttctttcaaatattttgtccagagctataatgttttctgcagaattgaccagatagcagctactctctgtgaccaggagccttgatcttccagacttgctgatgggctcacaaagctcctgcccgtggccctcagttggcagtggcctctctgccttgaagttgccatgagtgtgtaaaacctacaggctcaaccttcctcattagtacagtccagaaaagtggaattcctggtctgggtggctatggtgccctagaccactggctagaccagggtggtgactgccagctggccgaatgtggggtctccagcctagcacccttggactctaccccaggagttatggctgtttcagggccaggggcctggcctcagcccctgtcccccttctcttctcctcaagttgcccagcatcaggtcccaaccagcatcttttgcagacagggtgggtcggctcctcactagaggggcagggttgggcgggaagcctgttgagccctccttcctgtgcagcccacagccctggggttagctccagaggggtgcagaaaggagcccccaaaggcagaaactcacccttctctctgttcttgtgcttccagggataaaggagaggtggtcctagctggggggctaccagtggcatgcaggaggcccacatgaccactgtttgctggggcctttccttctctgtgagagagacgagagagaggagagagagtgtgagtcagggtagtgtcttcttccagtaacgcagacttctgcacgtgttctctaggagaaatcccgtcactcgctagagctctagatctggaagaagctctgcctctcttctctcctccagtgcagtgtgtgtgtgtgtgtgtgtgtgtgtgtccccacatgcattacacccttctacagaggaaataattcccgtccaagtgcaaaggttgggattggagcaggcagcatgtgggctaaaggagcagagaggaggaaacgggggcgggggtgagggtgggaacaggaggtgggtagatgccacgaggcatgccttccacaactagaagggctggtggagatgaccagaatgctccagacagaccttttatcaaacttccaaaattcaatcttgtttcatgaagcctgaggaccctgcagagtgaaagacaaggaagggctttcctgcaggggggtgtgtgtgcctgtgtgtgcctgtgtgctgtgtgcccccatgtgtgtgcacgtgtggacctgtgtggtgtgtgcctgcacatgtgtgcacgtgtggacctgtgtggtgtgtgctgagtgtgtatatgtgtgtgcctgtgtgctgtgtatgcacttgcacatgtgtacacagatctcattttccttttttctggcttactaagtgccagaaagaatttccgtgagcctctccacccttcccaaggctgcacatggagggacttgcgcaggcacatgtgcgcgtgcacacaacacacacacacacacacacacacacacacacacacacacacgagtcaggggcgagcactcctgtggattgtacctaggcctggcaggaaaccgggttctgggaaactgtaggccccacctttggcagaaaaccatgtttttgttgctgctcgttgaagggaacattaagtggggctggggacagtttatgttgagaagagcaaattttgcctatggcactggggacattgagtggctcctgtcccgggctctggagggcttgggagacacgtctgcagctctgggcatctctcaaggtcacgggcggccacactcaaggttaggccctcctctgtgtgagctgcggtcagcaggaaggctgacctcagaggcggccccagggcccttggaggccctgcccctgagacatgggccaaggtcagagagccgagaaggctgctgctgaggactctggttggcgcccagcccagcggcccttcaggcgggccctgtgcaggggctgatgaagtcagctgggaaatctgtgaaataaagcacaggtcccccaggcttgcccagagccccggcatcagatgaggtgcagagaagggaactgagctgccaagtgtgaacaggagagaggagccccaggaccacacaggggccccgacatggcaggtgcttggtcagcagcggtgctgcccttactgctggacgtgggaaaatgcactgacacttgctgaccagagccggggtgagcatctgggtgaccctgcagatgagacaaaataagggctgccgtgggggaggggcccttgccgggccaccctgctgaggccctgtgttactgtcctgcggctgtcataacaaaggaccacaaatgaggtgactcaaaacatccgaaatcggccacgtgcggtggctcatgcctgtaatcccagcactttgggaggccgaggcggttggatcacgaggtcaggagatcgagaccatcctggctaacatggtgaaaccccgtctctactaaaaatacaaaaaaaaaaaaaaaattagccgggcgtggtggtgggtgcctgtagtcccagctgctcaggaggctgaggcaggagaatggcatgaaccttggaggtggaggttgcagtgagccgagatcgcgccattgcactccagcctgggtgacagagcaagactccgtctcaaaaacaaaaacaaaaacaaaaacaaaaacatccgaaatgtcttccctaaagtttctggagccagaaatcccagaccgaggtgtctgaaggttcattcctcctgggggttccgagggagactgtcccatgcctttctccgagctctgcggcggccagcaacccctggtattcctcggcttgcagctcggcctaccccccacctggccttcaccctgtgtctcttcttgtgtctctgtccaaactgccctctctgttgtctttttaatttatttttagggacaggttctcattctgtcctccaggctggagtgcagtggcgtgatcatggctcactgcagcctcagcctcccaggctcaagcaatcctcccacctcagccttccaagtagctgggacacaggcgcacgccaccatgcctggctaattttttaatttttttgtagagacgagggcccaggctggtctcaaactcctgcgctcaggcaatgagactttgcctcccaaaacactgggattagagacatgagctgctgtgcccagcctacctctgtcttataaagacacctgtcattggatttagggcccactctgattcaatatgccctcaaataacccaattacatcttcaaagaccctatgtccatataaagtcacattcataggtactggggggtcaggacttgcatatgtcttttgggggaacacaattcaacccacaatgggtctcacccacagaacgaacggcctctccagggtgtgcgcaggtgggtgaggggcccaggagagggacctgcgtggcaagagggcttgtgttcacgtcagagattccagaaggagactggatggggtggctgcatggagcaaggggctacagccactgtctccaagtagttggtgggttgtctggtagaaagggagcatttattttgagttcccccaagatatgaagctagtaccaggtacctggaaggtgctagcgagtagagcttgactctttacagaaagaggtgtttttctcacaatgttcacttgaggacggtggaacaggctatttcacaaggtagtgagttccccatgcctggaagcattcaagcaggggccatgtgggagttgttcaggagtgcatagaagggacctcagaggtccctgccaataccatctttgcttgtcttattttacgacaacttgaatttcagaatgtaatgttattggggatatgtctactagaggggcctccagcatcaggccccacacactatgcatcatttttagggcagggaatgagagcaggctccattctttttggttgtctgtgaggaccaggaggcttgctgctgaggcagcttcctgtggaaacagtgtctcagccccgcaatccattcatcggagctccaacatcttaatgaaacactgtgtcagatgggttctgggcatgtgtgtgcagattgtcacaagtccatgagaatgcacacacgcacattgcatgtgtgtgcacacatgtatgcacacatgcacaagaacacgaagacccgaggcaggtatagtccgtgagacagatccctctaggctgaaagactccccacaagggtccctagaacaaggctccagcctcggcagtccctcccacttctggtgggaggatctccacagagaagaagggtcaagaagcacagctcttgatgctcacggtgtaccaagctctgctttaagcttgtgtcttattttttacttatttagcaaatctgtcgctcttgttttgtgccagatgctgttctcagcactttacaaatattgatgcatgtttgtttcatgacaaccctgtgaagtaggtagtgttaccccgttttatagatgaggaaacaggcgtagagggataaagggacttgcccaaggtctgtctctaccttacacgcacatgaacgctcactcatgcggcaggcgctagtttccctctgatgtgagtcaggccttgagctggttggggtctgggtcccactttggttgtgttttgctgtgggcaccaaggaagcttctagcagcctcatctccctggtatgacctagctccagggactggatttccccaaatgctcctgcccagcctggagcctcctttccagctgggggagggctgaacgacccctcactcttggaggctgccggagcccctcctgcctgcatgcggccgctgccgggtggacaggcctgcttgtgggttgaggctcccagcagctggggtggatcatttctcctcccaagaagctttgggagaagcagctgagggggccagcgtcctcctgaggccaattccctgcctcccccagcgcaggcgcgaagccatctttgcttgtgtgtttgccacagacagtggagggcggtgcaatcgtgacgcctgcttgttgcactttgcgtccttgaggacgttgacccctggccggtgctgggcgcttgctcttcagtcatcttgccctgacctggcgtggcaggcccgagcactgctcttttacaaggaaacaggctcagaggccttgagtcacttgcccgggctcccccagccaataattggctgagccaggatttccatccagctctgtgactccagaagtccaagttcttcccatcacgtcagggccaggaaaggattagaatgcttttctacgtgccgattatttggatgatctgtgcagcttagctcgttgtagttgctcaataaaaatgtggaatgaatgggcctatatgtcccattgtgtgactcagagccaatgactctggctgatcctcctgttttcattccgtggcccagcatctccctttggggtgtgtgaccttggaagcagtgactctctccatcccaccttgaatggtgtctgcgccgcagcaggggagcagctggggattgccagcgcctgttgctggtgggctgtgcgccagatcccgtcttggatgtgtgggtgattgtcagccacatgtgtgtgaagggctgtgcgtgtaggatttgtgcaaatgtgcccctccctgctgccagcccatgggaggctgtcaagattctgcccctgcacattagcccacactctctttgtggcccactgctgtggctgttcccttgtgtcacgtggctgcaggcacagcccccaagtggatggggatcgtgggctgaatgtgcatcagatgctcctgcttcttggtgggtggagaccctcaacccatgcaccgtggctgccgcatctgaaaggccttccatggtgaaggacttggacctgagcaaccctccgcagaggtcttagaagtgctccctggccgggcgcggtggctcacacctgtaatcccagcactttgggaggccgaggtgggcggatcacaaggtcaggagatcgagaccatcctggctaacacggtgaaaccccgtctctactaaaaatacaaaaaattagccgggcgtggtggcgggtgcctgtagtcccagctactcgggaggctgaggcaggagaatggcgtgaacccaggaggcggagcttgcagtgagccgagatcgcgtcactgcactccagcctgggcgacagagcgagactccgtctcaaaaaaaaaaaaaaaatgaagtgctcccagctcttcctcctgtggtgaggttctgagtttccatcctcagaagaaaacctggctggggagggcatctctagacccggacataaacgccaggagaccagggctgccctctcaggtgaccaatcacagagactcagggaaagtcacgtttggaagaggcgacactgtgtctcagcctcattcatttctccatcctacagacactgcctggtgcccagcccgcaccgcgaggcttcctaagcagctctgggcaccgtgcacctggcatggcctccagccccatctccctgccttgggagacccggtggggactccgggctgagctcctgtggctgtggaaccttggtggtttattgtggtggctgagaacagggacgtggggttggacgggttgagtgtaactcccagtggctccgtgaactgcctgggagccttgggcagctctttctcactctgtgcctccgcttcctgatggaaaaatgggggccaggggggagcgaccttgaaggtattcgtgggaaccaagcgaggtgataaatgtagtgtccttggtagagaactggacacagagtccacccccatgaagggggctgctcctcctccttctatgtttcctcttgttcttatttctcctcttgtatcttctcttcctgctttccctccccctcccctccccccccacatgcaggcacactccatttggtgccccaactgcctttctccattgtccttctgtaagtggttctctaagtgggaactcaggcctggaaagggtgggcaccctgtctggtgggctctggcaggccaggcgctgagcagcctcaggagacacaaccctaggaaaaggctcatgcaggctggctgtcatgacggactgttggtgggagaggggaaggcgccgtggtaggggaagctttggaaacatccactagtggccttatttatgactcaggacacctgccaggtcactagaacacagctgaggaagctgtcggccagacgtccagaagcatcaacctggtggctgggctgtggggggacctctctggacaggcagacaaggtgtcggaggaaggggctgacactcactcagtgtctgtcatgcactgagggcacaaagggcaggatggagagctggcccacgccacctgtggaatcttccaggtgtgggggcagatggggaagcaagggggcttgaagacacatgcgctcattaaatgtccttaaatcccaagaagaagaacaaggacacatccacaggggcagggctgaaagtctgatgcatggtgttttggggtctgctcctgctgcaacagctacagtggctccctcttacctttctcttccctccattctgttgtgaaaatgttcaaaacacatggtcaagttgaaagcattttacagggaacacattcagccatcacctagattctaccactaacaccaagctacacctgctttatcacctcaccgtccatctatccctccttcgcctggccatgaatccattttatttttattttttggtgcatttcaaagtaatttcaggtcatcctgattatctctggaatcactgtcagaaattccctcccttcccctcccctctcctttcctttccttttctgagatgggatcttgctaggtcacctaggctgaagtgcggtggtgcagtcatagcacactgcagcctccaactcccgagctcaagcaatcctcctgcctcagcctcctgagtagctgggaccgcaggcatccaccaccacacccagcttcattttcaaaatttctcaccaactcctcactccttgtattcacccaggaccacttctcacaaagccagggtgctgcaggaggggtcagaaccccaagccctaatcctggctctgtcattaacactgtgcgaccctcagcaaatcattttgcctgtctaggtcctgttttcattcctatgaaacgagggcgttaaactgtatgttataaataatgagggctaccagttaccaagctcctattttaggccaggcacttttcacatgttattatgagtcctttcaatctaggtattgttctcaatggacagcttagtcaacggaagctcagagaggtggtgtaacttgccaaaagtcccactacccagtgaatgtccccacggggtctgcacccaggagtctgacacagagcccaggcctcagcacctggcgatgttttgggggtgtgagcagcccagcctactctgggcacgtgtttacttgctgttccttctgcctcatgtttgtgtttgtcccctctgaagctcagactgttattttccagttccaaataccaaaactggctaggcacggtggctcatgcctgtaatcccagcactttgggagaccaaggcgggtggatcacttgaagtcaggagttcaagaccagcctggccaacatggtaaaaccccatctctacaaaaaatacaaaaattagccagacatggtggcgtgcacctgtagtcccagctactcaaggagaacccagctacccagctactgaggcacgagaatcacttaaacctgggaggtggaggttgcagtgagccgagatcgcaccactcctctctaggctaggcaacaagtgtgagactctgtctcaaaaataataaataaataaaataaaataaaaattaaaaccaaatgccaaaaccaacccacaaaataaaccttggttaaagtagcctgttcattttgctttaactatgtatattgcaccagattctgccaggggctcagcgtataaagatgagacccctgccctgccagacaggtgggatgatggccataccttgagttagtcaaggcaccatctggctgtgtaacaaaagctaaaacatcagaggctgagcagcactcggacccacgtcccagtccaagtgtcagtcgttatgggggcccaggacagcccggacctagttcattcctttggtgcatcctcgacacacagcttccatctcttgagctgagatggttccagctcctgccgtcatgtctgcactccagccagagggaagggaagaagggagaggggaaagggcaagtgtccctctttatttttaagggcatgacctgaaagttaaacacttcagctccttcccactggccagaacccagttgtatggccgctcctgtcatcagggaggctgagcaatgtattcttcagctgggcttccctgtgcacaaccaaaacttcagttactatagaaaaaagggagctcagatattggggaaacaactagcatctgtaccacatgcactgatagctctctttgtatgaacagagctgtggcaggccctatgccagggagaaagtaagattggaaaagagcttaccaaggaggtggcatttgcactgtgcttaaggggcaagaaaaacgtcttccaatcaggagccacaaatgcttggctgaagtgctactgctctttcatcctggagctggaacagacgtcaccagtcaatcatgatggctgctgggtgcactggctaacatctataatcccagcactttgtgaggctgagggtgggaagattgcttggggccaggagtttgagaccagtttgggcaaattgcaagaccctgtctctgcaaaaaaatataaaatgtagctgagtgtggtggcacctgtagacccagccccagctactcgagaggctgagatgggaggatcgcttgggcctaggagttcgaggctgcagtgagctatgattgcaccactgcactccagcctgggtgacagagcaggacctgtctctaaaaacaataaaataaaatcaaagttttaaaatggaaaaaaaatcatgagcacataactccagatgtatcctcaagatagcaaacccgggtgggcgcagtggctcatgcctgtaatcctggcactttgggaggccaaggtgggtggatcacctgaggtcaggagtttgagactagcctggccaacagccccatctgtactacaaatacaaaattagctgggcatggtggtgggcacctgtgatcccagctacttggaaggctgaggcaggagaattgcttgaacccaggaggcggaggttgcagtgagccaagatcacaccattgcactccagcctggagaaaaaaagcaaaactctgtctcaaaaaaaaaaaaaaaaagcaaacccagggccaggtctgtagccacatggccaccttcttccctgagcatggaggcagcctcagaaacctgccccacatcacatcagtgggcagttgattgggtcagcctgccagttgaaccctatttgccacagtcattctccatagtaaggggcattctagacataccccccttcccagggaagaataagccgtagctgcctgagcgttttatccagtggtgtgcatgtcttttcccaactctgtgtttagtgatgtcctgtttgtagcttgaaatttgccacagtgggtgtgtttacaccacaggaattggcaaacactacatatcaggccttacctcctgctccctactagggtaggttgttttttttttgttgtttttgttttttgtttctttttttttttgagacggagtctcgctctgtcgcccaggctggcgtggagtgatgcgatctccgctcactgcaagctccgcctccctggttcacaccattctcctgcctgagcttccagaatagctgggactacaggcgcccgccaccacacccggctaattttttgtatttttagtagagacggggtttcaccgtgttagccaggatggtctcgatctcctgacctcgcaatctgccctcctcggcctcccaaaatgctggcattatgccactgcgcccggcctagggtaggttgttagaaatgtaccagcctgccagtttcagccttgtttgtctttcatcctttttttttttttttttttttttgagacggggtctctctctgttgccccccaggctggagtgcagtggtgtgatcctggctcactgcaacctctgcctcctgggatcaagtgattctcctgcctcagcctcccaagtagctgggattacaggtgcccaccaccacgtccagctaaattttgtatttttagtagagatggggtttcaccacattggccaggctggtatcgaactccttacctaaggtgatccacccgccttggcctcccaaagtgctgggattacaggcgtgagccaccgcactgggcctctttcgttctttcttaatgaaaatcttcctgaaagatttgcctactgatgtctgtgtcaataggtactgcctgcgggacagagcctgccctccttttgaaggtctttctctgtctgggtgaccatctgcatgtcactccctgctgctcagaactaaagatgtagctatgcctggggtaggttgggaaaacctgtgggaatcacagagcttgctgtcatgctgtgttctggatacctgaagcttggcaggcaggtgggatcgagggtgggcattaggaaagtgatgtggctctataggaaggggacataggtcctgagattttaggtccccaattggacaaagctgttttttttttctggataaatgttctagcttattcataatcgagtggtcagttttcttttcttttcttttctttttttttttgagatggagtctcgctctttcgcccaggctggagtgcagtggcgctatctcggctcactgcaagctccgcctcccaggttcacgccattctcccgcctcagcctccggagtagctgggactacaggcgcctgccaccgcgtccggctaattttttgtatttttagtagagacagggtttcaccgtgttagccaggatggtctcgatctcttgacctcgtgatccgcccgcctcggcctcccaaagtgctgggattacaggcgtgagccaccgcgcccggccaagtggtcagttttctcagctgccgggtcttgcacaccttgctggctctggagaccatatgcaccatgtagaccccatttgtttcctaccctcagtgttgggggaggggccaagggcctgtcgatgtgttgacacctggccattcactggccttgaatgtccacattcacctccttgaaatcgatgccccgtatcggaggctccatgtggatttgggggcagaggcctgtactccagatggtggggtggccttcaccaatcaggcagattccctgccctgccctgccctttgggctctgtagctccagatgtgtgctcaagatctgtggccacatggatgggacaagccacagagactcagactccgtggtccctgtgaccagagtagccgtggccctgtctgggaatgttcccaccctgttgctgaaggtgagaaatttctctgtgctggagaacagctgtgctgagaagttggcccatctggcttgcaggactgctggggcaagggaggtctgctgccggtctcttccttcctcctctgactgggtgctccttgtctaggttccttgcagcaaaagaattctctaatttattttgttcccttattgagtctctactccatgaagcccacctcctaatcccagctgactggctcccacctcctcaagaggaaggccaggggcagacgaggctgaaggaggctgactcccctgtgccttcgcagtctgagctgatgctgctgtatgttcacagggctccttcagcttttaaaaaggcttcaacacgttcgtcacacgcttgtggctctcctggatgccacactaactcagtaaggcctgagttagaggctgttcctgaggctgtgaaaatagaagaagggtccagaggagaatcccttcatctgacgatcccaggaaggcttcctagaagaagcagcctctgagctgagacctgaagacagatcaggcctgagtcaggccagggagggtgtgaggggcccaccaggcagagggaacaggatagggcaggcacagaggtctggcacctggcttgtggggaagtgtgagcccctgggcatgaccaaggcggggagaagtggcgtgagaggaggcagatgtggctggcaggagatcggcggccccggccttgctgagctccactctgtatgcaccaggtgacagaggctgcccaggacggtgggcagggaagtgacaggtcacatggtcatcccaccaacagccgggagtccagcttggggggacccaagaccctggggaaggcacgagtcaggggcctgctagagccaggagctagtgggagaaggaaacagtgttgcttatgaattataaacagacactcccgcaactttctctgacgtgatacaatctcaaagtgggccacccagaggtgggaaggtgacttctggctctccaggccttgggcctgtcttttttttttttttttttttttttttgagatggagtctcactctgttgcccaggctggagtgcagtggtgtaatcttggctcactaccacctctgcctcctgcgttcaagcaatcctcctgcctcagcctcctgagtagctgggattacaggcacctgccaccacacccggctaatttttgtatttttagtagagatggtgtttcaccatgttggccaggctggtctcgaattcctgacctcaggtgatccgcccaccttggcctcccaaagtgctgggattacaggcatgagccactgtgcccagccgagcccatcttcaagttctccctggccctcagtgtttctgtattagttcacccttttggctccctgcttttaagagtctcccttaagactgtccccaagtggacaggtccccagaaccaaggagcagccttaggagtccccagttacagacactccagggggtccgtgtggccctcagcctctggcctggttccggcagccttggtcctttgtgctgtctctcacatagcctggccagagctggccaggtcccttggctgggccgagtcatcgtggccagtgactcatgcagggggagaaaagtgaggagggggaacagagtgcgagggggactgtgttaataacaaacccattaggtccctgaggtcacttcacaggagggacaaatggttcatttaggttgatctggctgccggctggcttccagagacactcagggtggggaagatttcattatctggggaaagcaataccagattgtctggaggggcccagccagcgcaccccgcgcttcctgtctgcctcccacgcagagcgttctgttcccaaggcggcaggccaagagcgcgagccgaggctcaggtgcaaagaggggtgcggcatgggggcactgcagggcacggggtgcatgcatttttatttatttttttactgagtgttagggtaatttgttaatggggtatatttggtgacataaaaccttctgtcgattcatggcagtctggaacggagtggaagcgtcccactcctggggaacccccacacacatttggctgtgaacgtcggtgcctttgcactggagcctctttggagtgtgctgggcagagcggagaggttcctcttctctcttctccatcatcctgtggaggtgtcaacatgtagccagagatggtcagtggcagtgaggagaggggggcaggaagagaccagggctgggggcttgccagcccacagttctacccctgaacacccatggcctccctgttcaggtcagcgaggctgggggcagagacgggcaggggtcccccaatgttgggcatctccccgctccctcatactctggatttgccctctggagaaagctctggagcacccagaagtcctggggctgctggctgaggtggggagcagagcccagctgtgcctggaggctccccacttccactcagcttccagggacagtctcagctgtgcaggcccaggccgctgaggctggctccagaaatttcttcacaaccaccactggatggaaaaccagttctctaaagggccccagagccagttttgtttcttcttccacaggttcccatagttagagcatcgggtctttgttagagatgcagaagagacgatgtccccagcccttatgtggttcggtctccactgtggatgttggtgatcttagtctccttctcaaaaccaagagggctgatgccccacattccaggcccccagaaagagccgccacccacccacaccgctacatcttctttccacttttctgttccggaaagagtagagtggatatgcgctcctgtagaaatccatctacagcctgactgcagatgtattttgctcccttattgagtctctgctccatgaagcctgccttgtttgtacctctttctctctctttctctctttcttccctctcttccttcccttccgttcccttcctttttctttccttcctgtcttattctttcctctttctttctttcctctctctctctttccccctttctctgtctttcctatcttttctttctctctctttcctcttttttgaacagccaaagatagaatgaatggcataggtaggtactgagctccctgtaactggaggtgttcaagtgtagggtggatgggcatttatagggcaggcattgaggaaggatctccctgggattgtggatggcaggacaggccctgtggagccttctgagcgggtgcagaagagggagggcatgttcctgctccctgcccttcccgggttgccaggccgccactcccaacctccaccctctttccttccacctgctgggccttacgggatgggcagaggcattgttagaacatggagccgcggtccacagagggccagcagggaggagagctccctggggaccacgtcgcctcagtcactgtggtgactttgaaaataaatgctttcttctctgcttgagtccctgttgttcctgctgacgtggaactagggcaggctggtgactcagccctcatccctgcactgcatcggtggcaagttgcctccagcctcagaccccacagagcagggtgccttcttcagaaaaacagtagggaggccaggacaccaagggccccagggacagcctgtttctcctggctggcatgagttctagccaagcctcctggtaccctgggggtgaggaggtaccagctgtgtgctttagtcactggctgctttgaggctgggtcggtgccaggctggccactccttcttgtcccctagtgtgactttgcagagctcccggaagggtcagagggtttttttccatcactggtgtccatgggatactgtgtccccatctcatttttgtactccagtctcagacgggtgctaggaagttggagactttagccatttcacgactgtgtcttgcggggctggagtaggaacaggagtaggaggaacgctctggtcatgggactgtgtgaagagagaaggatcaggaagaaaacatgagctatcatgtctgggttatacctcagcagagccgctggtggcctcccaggcatctgaatttactaatcacaaagctcaccaggtgtgcaaataaacaaatgctgttcaggaggcacagccagggttctgctggagagggatcatcttggaggggtcatactttccacccagtccttcagtccttctgtcctgtgtgtgtgcagcccctgaccaccaccatccctgcccctgccacttgctcccagggttccatcaggttggatgttattgcaataaaatgtagcaacagaaggtccaggcagtgctgcagtccctggtggtatcatcagagccagcaggcagcagggctggggaactccaagctgattcagtcccaagtgccggagcggggagctcggatgaggtgggggtggggaaccggggagccatggagcagagcatttgctgtgctgaaggccaggagcctccttgggagatcatgaatttagaacactaatactttgtttaaaaagtcccctgccttggagataagagctcaggccgctgtggtcaggttttgctgtaaatgttctgcacaaagcaggctggggggatcactgggaagtctggggaacagattggtcatgtgcttctttgagtgaaaccttatggttgcattgaagcggccaggcagagggtgtgatggggtgtggtagctgcacaccggctcagtcaggctgaatggggaaatgcaaactcaggtggcctgaaagagacttagtggtccacagcctggtggctgctcccagtacaggtgatgtaaagagagaaggggttccgggggcttggcccaggtggaaaccatgcactgtctgtgatcctgggcatgtcgaggctggagcaggtctgcttggtggctggcagaacgcacatgaagaatccatgtgtgttctgaacgtcccctctgcccctttgggctcatgccccatcaggagtctcccgactctgccattctgcaaaggaaactgcgctttgtcattgcacaggatcgaacaggtgtgtgtggagtccctaaagccactgtctcaaggggtctcatgggacaatgggagagttgctgtgatgtttaagactaaagtgatggctgggcgcagtggctcacgtctgtaatcccagcactttgggaggctgaggaggatggatcacttgaggccaggagttcgagactaccctggccaacacggtgaaaccccatctctactaaaaaaacaaaaattagccgggcatggtagcgggtgcctgtaatcccagctactcgggaggctgaggcaggagaattgctccgatctgggaggcggaggttgcagtgagccgagatcacgccactacactacagcccgggcgacagagtgagactgtctaaaataataataatgctaataataaataaaataataataataaaataataaaagcaaggacttgaacaaatatttgcacacccatgtttgtagcagctttactctcaattgctcaaatgtggaaggaatggatatacaaagtgtgtgtacacacagtggaatatcattcagccttcaaaaggaacggaattctgtcactacatgtgaaccttgaataatgaaccttgaagacctcatgctacgtaagcctgtctcacaaggacaaatattgtatgatttcacttatgtgaagtcaaattcatagagaaattggaatgacggttgccagcagctaggggaaggaaggatggggagttattgtttaatgaggacagagtttcagtttgggaagttggaagaagtttcggaggtggatggtgttgatgggtgtacaatgtgaatgtacttaatgtcactaacatggaaacttggttaaaatggtaaatttgtcttttttgtttttgttttttttttttttgagacggagtctcgctctgtcgcccaggctggagtgcactggcgtgatcttggctcactgtaacctccgcctcccaggttcaggcgattctcgtgcctcagcctcccagagagctgggattataggcgtttgccaccacgcccggctgatttttgtatttttagtagagacagggtttcaccatgttggccaggctggtcttgaactcctgacctcaggtgatccacccaccttggccttccaaagtgctgggattacaggcgtgagccatggtggctggccaaaaatggtaaattttatattacatatattttatcacagtaaaaatgcattgctctattagaaaaatgatagatttttacaatatgaattaaattacaagttatgaaggaaaaattaagcaaaacattaaaaaattacttataagtaattatatttaaaacaaaagataataaatacacaactttcatcacctcttaggttttttgcaacatttaactattgtctgtcctgttgcggttatgttcttgaggttgtatttgtatgatagaaacactatattcgtggtgactaaacatctcttctcagtctcacctccaatgatgtcatacagataacttgaaattggccggctgggcacgatggctcatgcctgtaatcccagcactttgggaggccaaggcaggcagatcatctgagttcaaaaccagcctggccagcagggtgaatcctcatctctagtaaaaatacaaaaattagccaggagtggtggcgggtgcctgtaatccgagctacttgggaggctgaggcaggagaatcacttgaacctgggaggtggagtttgcagtgagccaggattgccccactgcactccagaccgggtgacagagtgagaccctgtcaaaaaagaaaagaaaagaaagaaattggccaaggcaggaatattgacaccacaggaataggcaagcgctacaaatcgggaaactgagtgttgttgcttttgctggccccaggtggccggttgttgaccgttaactggcacactactggaggagggaggttcagactgattcgcagagagactagaggtagaaacgcaccatggtttggatgctgagggtgagggaaagagaggagtcaacagtggtgcccggagacttggcttgagcaactaggtggatggtagcaccgtttcctaagatgaggggctgtgggaacttgaggggctgtggaaggctctgccactgacggacccagggctcggcagctctgggaggcctactttgtgtcaggccacgcagagataagaccatctgggccctgcccttgggaagtctctgtctatgaggacacagcctgccacctaatggggtgtcccgtctggagcctcagtgttgctgggagaaagcccctcaccttccttcgctctccgagcctcttttgcttccctgccagctgagcctctccatggaggctgtgcctggaggggggtcatggatatggatgtgtgcgccaaacgctgcttcctcgtggatttcctccccactccgttcccacgctttgtaagcttcatttccccggggcctgacctgtggggtttctctccagacctgctccttcccatttccagaaaggcgtgcaggggtttcctatggctctcttccctgtccccatcccccttcccttgggacagtgatctgctggacgggtgggctacccacagggtttgtgattgcttagacatctttgctgtatgaagctttgacctcaaggcatgatgcagatgggaataaggcacgagtttctcctggctgctgtaacaactgtcgaaactgggtggcttatagcaaggggaatgtgtcctctcacagttctggaggccagaagtctgaaatcaaggtgccagcagggccagcttcctctgaagactccaggggaaaacctttctttgcctcttccagcttctggtggccccaggtgttccttggcctgtggctgcatcactccggtctctgcctctgtcttcacaaggcctttttctgtgtctctgtactttcttttctgtctcttagaaggacacagcattgaatttagggcccaccttatcttgagatccttgcctaaattctttctgcagagacccttaaacagaatcaggtcacatttgaggttccaagtgggcatatctttgttttgggggggatcaccggcccactgtaggtctcgttgtgcactgaagacgcaggcggtccctttggccaggcctgcagtcggtcttgccttcttttgtgaccgtggaagaatgcaccttgctggatgcacaggcctttatagttcttttgttcttgccaaatttcagctcagtttcctctctgctgccggcgtgcatcttctctgcccagtgccccttctgggactgtgtgtccaggccctgaggccctagaaaaggggggtggagggcctcctcactatcctgtagcaatgaggcctcattaaaatcctggagccccagactggacccagcccttagctatgatcaaaggacagctcgggatatgattaaagggctagagaaagatgatttaggctgagaaagaggaggccaaggagcaactggattgtccttgaatgtggaaaaggtaattatgacttgaagggtggtgcccagctgtttcccatctcctctgaggacaggaaaaaaaaggaaataaatgatgtacaattagagcagttggttagatacgagggtgaacttcctggctgggagtatggccaagccctgatttgggtttcctgaaagagctcggggaacctccttacctggaggtttctaggcctggtcatgtggctctgagtgattacattgaaggggcagtggctggggctggagccggtgggctctgagcacagtcacgaaggcatgcgcactttctggctgctctcctgccattgtcccttgggttcccattttggtgaggcgtgcaccctggcggcgctccccagggaactaaatatgtttgctgcactgtgcgtggagatggagaatgtacaattggctgaccctgtgctaatctggtggaactccatgccagccctgggaaagaacaattgcatgggtgtgtccacactcaccaggtgctttttagaaaaacactcgagaataatgctgtggcttaggatggctgttgtgccggacccggcatcttcccaggggggctgtgttgttgggctgagtttcttaggtactggacccccaaatccccaaatacggcgtggacaggtggcccagtaggggctggactatccgataggcccaggtgctggagttcagacaagacataccctggcctggcgtggaagatacggggtgctattaatggcagcaatggctgcatttctgaaacccgggctcccaggccgacgagggtgtgcacgcatctgaaatgtctgtggttttgcagttcccatgtccacaaactcacttggttgaaaatagttcaaaatatccaaagcatgagggagggagtgcctgcttttcttaaaaaggaaggacttgatttcatctacttaaaaagccacccaaacctagaacattttccgcaagagaccccctgccccccgcctctccagaatggctggagagtctcagcactcctgcacatttgggatatttcagagggggtggggaggggcaagtgggcagcgagcgacctcagacccaggatgagctgtcaggcgctccccggccacacattcaagggaccggagtgcagttgtagcgttgcggcctgctgcttcgggggtgggggtgttgttccatgctgtgaattctcacatggcccctgactctgggcagaggccgagggtctaagggacggggtgacagggagagcatgcaggagtgggtttctggctttccagggcgagtggaagaagcgcctctctctcttgtaggtgacagacctggggggcccttcttgaggatgagagcctgttgcttctcaagttctgtgtctaacccaggtccccaggtctaccccagcccctcggccctgcctgccttgtggatgatatagtttaagggtagagaccgctggcctggagggaaggctaggcctcaggttagggcccagaagggagggagaagcccttggggcagctccctttctgctcactcactgcctagctccttccttcacaccttccttcggaaacgtctgctcctgacaaggtctacttcctgctctcaggaggcccttattgtggaggaagggaggcgtcgcccgtccctggcttctctgacagccgtgttccatccccgccctgtgccccttctcccggacagtgccttctccagggctcacccaggagggtgcagcggtggcccccggggcggtggtcgtggtgggggtgttagctgcaggggtgccctcggtgggtgggagttggtggcctctcgctggtgccatgggactcgcatgttcgccctgcgcccctcggctcttgagcccacaggccgggatcctgcctgccagccgcgtgcgctgccgtttaacccttgcaggcgcagagcgcgcggcggcggtgacagagaactttgtttggctgcccaaatacagcctcctgcagaaggaccctgcgcccggggaaggggaggaatctcttcccctctgggcgcccgccctcctcgccatggcccggcctccacatccgcccacatctggccgcagcggggcgcccggggggaggggctgaggccgcgtctctcgccgtcccctgggcgcgggccaggcggggaggaggggggcgctccggtcgtgtgcccaggactgtcccccagcggccactcgggccccagccccccaggcctggccttgacaggcgggcggagcagccagtgcgagacagggaggccggtgcgggtgcgggaacctgatccgcccgggaggcgggggcggggcgggggcgcagcgcgcggggaggggccggcgcccgccttcctcccccattcattcagctgagccagggggcctaggggctcctccggcggctagctctgcactgcaggagcgcgggcgcggcgccccagccagcgcgcagggcccgggccccgccgggggcgcttcctcgccgctgccctccgcgcgacccgctgcccaccagccatcatgtcggaccccgcggtcaacgcgcagctggatgggatcatttcggacttcgaaggtgggtgctgggctggctgctgcggccgcggacgtgctggagaggaccctgcgggtgggcctggcgcgggacgggggtgcgctgaggggagacgggagtgcgctgaggggagacgggacccctaatccaggcgccctcccgctgagagcgccgcgcgcccccggccccgtgcccgcgccgcctacgtgggggaccctgttaggggcacccgcgtagaccctgcgcgccctcacaggaccctgtgctcgttctgcgcactgccgcctgggtttccttccttttattgttgtttgtgtttgccaagcgacagcgacctcctcgagggctcgcgaggctgcctcggaactctccaggacgcacagtttcactctgggaaatccatcggtcccctccctttggctctccccggcggctctcgggccccgcttggacccggcaacgggatagggaggtcgttcctcacctccgactgagtggacagccgcgtcctgctcgggtggacagccctcccctcccccacgccagtttcggggccgccaagttgtgcagcccgtgggccgggagcaccgaacggacacagcccaggtcgtggcagggtctagagtgggatgtcccatggcccccatccaggcctggggatatcctcatccgcctcccagaatcgggccgtgggggacagaaggggcctgcgtgcgggcagggagagtattttggctctctcctgtcttcggggtttacaaagtgtgttgggacttgcggggctgctctgtccaagcctgggtctggcgtccgcgtctctgagcctgtgagtgcgtgcgctttcctgcgtcctcttgactgccggtgctggggctctgcgtcctgcgtccgcgggagtaaatacagcaggcgaaggggaagctcacacaatggtctccagcgctctggggcagggcttctgaggggcgggcctgcctctgccgggacctggagcccccgcccctcggagaggctcctaggctgacttgggcagagccctctggtgggccgggagggggaaaggctgtgttgaaatgagcaaactgtccaggtgtcaggccaagctgggaggtgaccagcctgaggtcctccccgctccatggccagaaccagggctgacatctgggtgtcctgagcccagctgcccacacggcccacctggggtcagccctatctgagtgggggaggcggggcctcctgggggaccagaactttggctggacgccaagcagagtgccagtggctgttcttcagggctgggcctgaggagggtgtggggcggcgaagggacgggagggggttgtgatccagtggccactggcgctgtgcagagtgtgagctggaaacatcgtagttactttgtcagcttagtggtgaaagccctttttcaggctctatccctttgcatccctgcttcccagagggaggggaggtctgggtctgcagagctgggagggcttgctgttcccgcccccctcccccacaacacctcctcatctggacatctttgggcacatgctcatactggggtctccctaggtccactgtgttccgttgagcctcctgcagtccccgagtgaatgtgacctccctgcccctgcctctttgcaactcctccctgcgaccgctcctccaggggccttccttgtcccaaatgtccaagtggcacgacttagccggtctgaccactttccagtaagcccttatggagagaggccctgtgttgtgcagagctctcctcctgcctgcgggatcgaggtctctgctctcagttcctaacagaaagtgtcgggcccccagtgggatttctggggaagaactctcgtgtctcaacgggagccctgtggcgggaggggaggccagggtttggggttgtgttcgttgtacagctgtcaccatttgcactatgaaagttgttagtgccccttccttgggtctctgggtgtaactccacccttgcccccatgtgcctccatctggagctgcttctgcggctgtctcccaagccagttttgtgaccctgtaatttagtccaagacaatgggctcattgagaccatcctggtgcagcagttggcaatcctttggctctgggggaaggtttctcagtctcggggagtggggcctcaatctgctggttccctgtgtttatcagtctcccccttgtgtgtcctgaatggttttgctgggaattctggtcttagagccatcaggtggcccgagtcgataggcgtgagagagtgtgtgtgtgcatgagtgcgcatgtgcatgggggctgacctggggtatggaaaggtggccctccctggtgcccaaggagcctggagtatagttggagggtgtgggggtgtgtatatgggagttggacaaccttgggtggacagacagacgtggggaagggatgattgaaggaggtggaggagagagtgtgattcagcccagccaggggtgatgtggacaggcagcttccgaatcagggtagagaaaagtcaccactagctagcaggggagaagtcagtatggaggaggcggaccttgagggagagtaggaattggattgcaagaggaaggagagccttctggccagcagcagccagcagcagtgggggaggctggaatgagctggctggagagggggctggggcataaggaggggcctgcctgtgaagatcatatgggccaggctgcggagggccaggcatgcccgccgggagtgcagctggtccacgggaagcatctggagtggctgggaatgggcgcaggagcagcgccgtgggagcacaggtctctttcccggggcggctcacctggtgtcttggttcctgcaaggtaggccgaaagggtggggaggaaactgccagctccttacagcgctgggatggtggccccagggttcctgaggccagcggatgtgggtgcctgtcaccatgtgggttgctgaggggcggagactccaggggccaccccaaagcaggacgagctctgagccacggcatctctgggggcagttttccaatcgagcagacgtctaggcctggaatcctgtaacagaggccacagggccctgatcagggtgttctgggaggcttagaactagtggcagtatacagggtagacggcaagtgacctggcatggggaaagaggcaggtgcccaggccggcacagcacacccgtaaggaacaggtagacgggaagccgtccgtgggcctgtgtgtgtgctcggagttaaaattctgccaatgtcccatgtcctgggcacatctaccccctccctggggagcacctttctcttcaccttttccttccccgcctgtccccttcacccagggccttccccatccctcccgtcttggggaccgagggcaccatggctttatgttccatcaccgatgagttgcacagggattcagtccttccgctgttcaggccgggtccttcaggctcagggttcccaggaatggagagggtatcagtgtcttccatggactcaaacttcccgcatcccgcctttgctcccccttcaagataggtctccgagcttcaaggttttagggctctgtggaggccgccacgtagcagcaaggagaatgttttgtatttggctgatgagatttttagagtctcattttctacttttccactgtacaaacgggcctccaggcgactgcagcacccgccactgcccgtaatagggtgacaagagggatgaccctttcctctttctcccttctggttggtggaggcacggggctggcggacggcatgtgctttcgtgaattcaggccaaatctgttatcgcaaacacgattacaactcgggtctttgtgtaacaaaagcctttccaagtaccagctgttggcctgctttgctcagcggtgtttgctgtaaccagatttgcacaccgagaaagaatccaaaagtccttgatgtttgttgaaacaatctggcccaggacccacgtgctcagatcccagagctgtgtggcatctgagcttctcccgagcccccactgtcgcccgaggaggacccccagatctgtgttctggaggcagagcaggctgtgggacgggcttctgggtgggaaggaccatgtggatatgccttcttgtctgagagtcccaacacctccgggacgtgggagctggcgcgctggcaggattcaggtgcctctttcctctctagagaaaaaggccccgttgcttggtaataggtgcagacctgtccctaattaatgccagtaggcctcttgcgtgatgaaccctgcctttcagccaagactcaaggcatcctgtgaatactgcctctctgcagtttgagcttttgtggtgggaggcaggagccatggggagtgggggcaggcctcttacacgggtcccacagccactggcagcactgacttgatgctctttgagttcagagcccagggccagacagacccactgtcccgactacgagttggttcatttagaggggggcggacacagcacccaggcagcagatgcactgtgatcagccttgcagcggggctgtgggttctctgggctggatgtccgggaagaggcaggtggaggtaaacgccaggacacccctgcagtgactgggtgactgcaggctggaaatgctttctgtgggctgtggctgtccaggaaggttttgaatggggctagtggacagagtttgcatccagaggggcagtgctttggaggagtgaggggtatggcagtgtagggatgcccaggccgccctcactctgccattggaaagctgggcggcttcggtttcttcagtttcttcgcctgtttccctgcctgcaaagtggggttagaaacagctctctttgagggttgctgggggactctgagatgcagcccatggcgctgagcacgggtcctgcctcctacgggtgtggtgggtgtcgcggctggtgtggcatctgggcgggaaaagggggcatttgcaaaggacaggtaggtttggatgcttaaatatgcagatctggggatgggaggtctcaggcaagggcctgtgtgatgccactgtatgaatgaggccggacagcatggtcaccactaattatggaaagcacggcagacactagtgccagtagcgcccgcctgggggtccctctgagcccgacaggtactcaggctcccagtgcagccatgggaccccccttttcctgcctggctgacattctggaggctggcgtcatgttggctgcaggttcctcttactgggaggttgtcctggtcttccctgccaccatctacccccacccccaccctggagtgtcacagatgggtggaccatatgcccatctgcagggccaagcgctgacaatgaggtgagcacttgctggatgaccggaccatgaggacagcgggggcgctggcagcctgcgttcggctctgcaggctggcctttccctgaaaagcggttgtggcagagtgtgcatcccagggagtggtgcctgctgccctgaacattctcatccagcaggcctctgcaagggcccagtcaagtgtggtgcagagctgggctggcagctggaacagtctcatcttgtctagtggtgagaccaagggctgatgggccaaggctgcgtgctgcttgcccagcccgtggacccatccactgagcacccccatacccctacactgggcccggggtgtcaggaggtggaggggggactgggtgcctggaaaaacaagcccaccgagagcctgagcccccaggggtcagtatcaggcagtcaccacggtgcccggtacacagtggccacctggtctcgtcggctgtcttggtggtggagagcgtgcatggtggccgtacgtgatgggcatcacccagggtaatacagatatgcagactgtgcatttgtctgtaggagccagggacttctcagcctggcaacctgtgacctctgcctacccgttgggagagaggtgctgttccctgatagcctggtgccgggagagcagaactagggtctcctcctcctttctccacctcccatttcttacatgcccaggcatcaggggaggtcacactcagggatgagtcttggccactgggttcagggcctcactgttgccatctcttccctttgccagccagccaaatgcccgtccatcatcgtgccggggatggggctggcctgctcctctgaagtctccttggtgtatagcctaggctggagccccggacgattccgccaccccctcccccgactttttctttttattttgattcatcccagaaacccagccaaaaaccaagttcctgtgctctcccttgacaaagccactgaggaaaaatggtcaaacactgcctttctttccaaagccctcttggtttttcccaaatttggaggctctgagttgcttatgagaccaaagggtccggaactctctggaacacagtcccagaagtgggaggatttgtcatctctccagccaaacagacccaccagttggcccctagacacccccaggcgcctggggcatttctgggctcaggctgtttaatttggtctgcagagccccgaggctccgtttagactgggccagcagacagttctagagacttcaagtttgttgtcgtttttaaaagtcctgccaatgcccagaaacttagagggacaagaagatgacctcgatgtcagccgggaccataaacagtgaggcccgcccccccccccacccatgcctgcctccactgctcccgtagctgggtctccaggggattgcccgtggccatgggggaggccgggaatgcggggctcagactctactgggcttctcgtatttttttgtttttccttgtccatcttctttctcggaaatttctgaatatccccctacagcctttggcattctgtcactcctggcatctctgggccaactgggaaagccatcatttgtccaatatccagaaaatcaaggggcctggccttaaatacattgcagtgccctcctccccacatggcatcgaatttcctgtgtcctcaaagccaggagcctgtgccttggatgtgggcgatggagccttgcagacacctggagcggctttcctgggagagtctccctcgccttcccatccacccgcttcccctcccctgccccaagctctggtcacagcctcggaggggtcatctgagtgtaggttgcctccaggtgtacagttggaggggggcagttaccccacatccccctgtctgctaggggcacccccagggactcaggtcttgagggacagcggaagggtggggtggggagtaggccgttgtctcgtgccacctgggtgttatgtagactctgaatgggcagttcctgggagctggtttttccttctcaccccttctacagtgctgcccctctgaggggctggagctctctggagccctttgcagcctgtggcaggtctttctgattctgtgcctggtttcgcagcctccaacccatagccagtggcatgaagaacattcctggctgtctctacctgtggcctttgcaggcagcagttccctggggcagggcctgggggtcctggcacctccttgtgggaccccttgggtatgagggagggagccacctgggccacagatagacccccttcctgtatccaggaggttcaggatggacctgtctcatctttctttctggtgggaagagagcattcctggccatggggaatgtggcctggacagagccacctagcctctcccctcccccaggcagggccctgaaagatggagatggctctgctcctgccaggtcaacagccagcagtctggtggatttccatgcagtccaggcaggatctccttctgtccccaccccccaccccatgtgcaggaagctggttccaagcagggacccttggccccgctttccacgtgggtgggcagtttccctgcgaggggcaggccaggcccctgccctatgtcccccagagaccgatgttatctacagtaagagcatacaagtctttttggctccaaaccaggcctggaggggtggtcttctcctctgtcctctgcctcttgccccccattaaaggtcagggaatggagtgctctgtatgtttgctggggttgggttttttcctttggtttaaaatgaagggctggaatccctggtgcagactgcacggtgagaggtgctccttgggatccactcgaggagcattactgctgaatgccctgccaggccaggagcatcgctgggggtgggagaggcagttggcttatttgtttatccaacagccatccatgggtaccccaagggccagctctgttctaggcactgggggtctaggcatgggctcaggagaaggggtagaacgggagggcttcctggaggaaggcttcctaaccagagaccggggtaggagtttgccaggcaggtgatgctggccagcttctcttgccattttccttttctttttttctttttctttctttctttttttttgagacagagtttcgctcttgttgcccaggctgcagtgcagtggcgtgatctcggctcactgcatcctccgcctcctgggttcaagcgattctcctgcctcagcctcctgagtagctgagactccaggcacgcaccaccacgcccagctaattttttgtatttttagtagagacaaggtttcatcctgttggccaggctggtctcaaactccttacctcaggtgatccgcccaccttggcttcccaaagtgctgggattacaggtgtgagccactgcgctcggccttctcttgccatttctgcagactcatagtgtgtgtggaagactgtatgtctgtgcctggcacagctgccctcggcactcaggtgggaggtgggggagagggctgttggtgccagcacaggtcatggcatgagacaggctcccgcagccaagcggggtgcaccgcagcattggaggggccctgctgcgcacgagatccaggctctgcatctgtcctcctccccaggaggcctggagggctgggagggaccagggtggtgaaataacccaggtgggagagaggcactgttggagaggcagagggagctgcaggtttgtagcagcgagctttaaaccctgggcctccaccagaaaacctcagaaagggctgctttgcttttttttctaaactacaaaagaaacccttggccgcctgggccccttggggtcgggtgggggaggagatccttcattcgcacctttgcaggcccagtactgtgcagagggaggagggtggaggcaaaggcgagggaggagggtggaagcaaaggcggggtccctccctagccccgctgccctgcctggttgctgctctcagacccctactcctggcccggaaacatggaatcttgggacagctggggtagggggcacagaacggagaccctggtgagggaggaactctttctccagccctggctgtggccacagcaaggccaggctgggaggacctcactcaaatatttacatctctcctaatatttaaatgatgaagcaggctcctgcacacagctgccctggagccagctgttgcctgccctaccctccctctctccctccctctttctttccctccctctttctctccctccctccttctctccctccctccctcttgcattctttgtctctgacccaagtccaggcccttccagctgttctctccttacccacaggcacctcctgtgactgagcttctccttgttatttttcataaccatttcctttaattgagcacctcctaggtgccaggccctgggctggtactttgtatacaaggtgtcttttaatccccacgagagcccaacaaggtagattgggctgctgaggctccagcgctggaaggccggcccgggtcctcccagtccgcacctgcatccatccatcactcccccactgtggagacctgttccctggcccctggctgagcacgatggaaatctctgtctactagtccttggagagtggggatggctgagggtcccgaccctggggtctgacgggggctgcctctgccccacttcagcctggctgctcttccactcaatgactgagtttgcaaaaccagaataacagtgctacctggctggtactttgggtggctgggaggcgtgggagagggtgcacggaggggctgagcgaggtgtcagcatcgtggggatctccgagggtagccttcccaggcccagggcggagtgtaggcagagggcgcgatggcccagcgtgccggctcacatctggccttgcccttgcccacacggcaatgtgggggagtcatcagcctctcagtgcctcagtttcccatctgtgcaatggggacaagagtaaatcactgtcttcaggtatggtaagcactcatacacattgactattgcagaatgaacacagtgagcccttcttaggcttctactacatgccaggcagggtgccaggccctagtggagaggggacaatgatgggcaagctggctcctgccctcaagggctgtcgagcagggaggaaggcggcggctgccctgactgtgacccggagtggggtgattcgcaaagaggctggcgggaggctggctgggggctggctgggggctgctccctctcctgcctgtgttccgtggcagggtattaaactggcttttttcatggatttccgaggccctgactgtgggacctcgggcaggttttgggaccttgtgactttgttcccgcttgtcattcaggcctttgtcctcagcagtgcccagcacacggcgacttctgcatgtccttcagtgtgtgactgaccctggagctgagacttggcagctgaggctggacattgtccttggataactcccggggaggtgggggcagggtggggctgtgagctggcaactccgagtccctagcagcctccgaatggaggctttcctcttgtaggattctcggggaggaaggaggggatgggggagatgaggcttgtgagtcttcaggagggcagaggttcacacctgcagcgccccagaaacactccggggtgcccaggcttacccagccctcctgagccagaaccaccaagagttggggaccagcagtccattttttagcaagatccagaaatgattctcctgaacagtccgagccaagaatgacatatctggaatcagaacatcagaactacagaggaatcgagagaacgggcccaaaatgtgtagggacctcagccacatggcgccacatggaggaaagcacccaacatcatcactgtatgaacctgtttaaacacacacacacacacacacacacacacacacacacacacacacactccccagtaaagagtggaaagacatttgtcagaatattgatggaagttacctgggttgtgggtttatagattttttccctttgtttttgtgcattttgcaaattttcggctttgtgcctaaattccttttacagtcaggaacaaagcaatagatgttattttttaaagttcatgggctcgtgcccgtaatcccaacactctgggaggctgaggcaggaggattccttaagcccaggagtttgagaccagcctgggcaacatagggagacccccacctttttttttttttttttttgacagagtttcactgtgtcccaggctgaagtggcggtggcacgttcttggttcactgcaacctctgcctcccaggttcaggtgattctcatgcctcagcctcctgagtagctggattacagacactcatatttgtaggatttgagaatcctacaagaggaaagcctccattcggaggctgctggggacttggagttgccagctcacatattttttagtagagacagggtttcaccatgttgaccaggctggtctcaaactcctgtcctcaagtgatccatccatctcggcctcccaaggttccaggattacaggcgtgagccactgcgcccggccatgggagaccccctcttaaaacaagaataaaaataaaaataaataaaagtttactgtcaaaaagaaaaacacatcacccaacctaatctccccctaggattgagagatgaggaagcagaggccggaaagtgtcacattccctggtcgctggcagtcaggggacctgaggcctgggctggttttctcgtgctccaggcctggggtgtcaggtggagcccctgctttgcccaaaggtctaggtgcctctgccagcactgcttgcttctgcatttttggccacaaggaatgtgggccaaaggcagggtccttgacctctgcccaggagggtgaagtgggctggtcctccttgtccctgctccaaggcccctgcggctgtgcctttggaaactgctggcccgagctagtgtgcggagctgggacagacctcaccgtggccctcgtggggtcattccatgtccgggctggaagggatctttcggtccagcccttcctgttcctcatcaggaaactgagaccagagaggtcatctgcctggcccggggtggggtgtagatggcgcttgtgactcctgcatgccacgtgcagacagtccctcagctgtgggcttcccacgcaagcagccatgctggggataacttggctgaaacctgcgatttaatgaagagaagaatgactcctcctgcagccctgtgccccacaggctccctcctgcccccacccctcctgcagaggggcctcatgctggtgggtgggtccctgttgctgcaatgggcccaggcagtttctgggcagtggaggcttggctgtcttcctgcccaatgtcccctgtagcccacgctgtccgggaagggcggggaagcactcagccactggggacttcacaagatgggtatctgggagatgctgattggcaggccaggctcccgtggcccacaggcaggtcagaggtcacagtgctgagctgggctgagttggcagctcagggcagtgggggtgggggtaccttgctcagccatgggcctctctggcacaagggtttggagtttactgtaaacaactccttcagtttttccttctctcataggccaccagcagaattgaggggccctctgttgatgaggtgtggcctgggaggggctagttgtctgtccacctgatccttgcggacaggtgaccacaggcttcctgccccagggggctgggggaaagatcggggaggcctctctggcttccccacttggaaggaaaatacgggcataggggagacactttacagggacacatttcagccagtaccctctggctgtgctgggggcacagtgcctgccctgcccacaagaggggtcagttctctccaggatttaacttcagccttcagtgcagggcagatgagcactcagaggcccagaggactcatatcacgagagagaagctgtgaccacacaggcactgaaggttaagcagaagagtgggacacacgggtgacctgaaagtcccagggtcagtgtggttagccccagatagctggggagctttgggtaccaggcttagcaggggaggagggcccccgtgacagtttgctggggctgctgcaacaaagccccacgaactttgggggctgaagatggttctagaggccagaagtccaaaatcaaggtgtcgaccaggctgatcctttggggcctctgcgggaggctccggcccaggcctctctcccagcttctggtggctcccgggtgctcctgggcatgtagatgcgtcacgccactccctgctccgtcttcacatggccttttctctgtgtctctgtgtctcgtaaggatgcttgtcattgcatttagagcccaccctaaatccaggatactctcctcttgagatcctttattgcatctgcaaagaccctattccaactcctgtcacattcacaggtccgagggctagggctctggcatgtcttttgggggtcactattcagtccactgcggcagctgatcttaggggaagcagaatgttctaagcttggggtgagcggagggaacgctgctgggtggggagtgggagaccaggctcggagacaccgcggatctcctctgtctgatgagggcgtgatgaggttctcatctcaggtcctctgaatggcggctgcttctgaggagaccctttcccctggatctgcccctccagaaacctccacttaggtccaggtcccaaggtggatggtaagaggcggctgtccctgccacacttgatgggtgagtgtgtgaacggggctgggagcaggacacttgtcacttctgtggacagattccagaggctcatgaatctgctgctggggaaggtgcctgatctagcctgaccctccacccccacctcccccttcccgccccccttcaccagccctgttcccagagcttcacttccccaaaggcaggcgccgtttcctggacttctcagcagctaccccctaccccagacccctctcttgtaggcccctctggtctcagcgcctactcctccctgggcttctgcccctctaccgtgaggcttctgggcagaagtgtggggccccctcgctgtgtctggctctcgcggtataccaggggtcctcccaggggcccgccctgcccgctaggtttccagggagcttttcaagttcttagatgggcttgatggagtttcccaatgcgttgtctcagagcaggaggggccccggctgagtccgagagtcccctcagtcacaccctgggctgtttggggcagccaggcagcccgtcttctggaggtgctgcctctctctggttaccccttctggaatcttctgcgtccagttgcggcccctcctacacagcacacccaccacccccttttacctgtgactcttctttgtcaacctcttcatgtctttgagaatggagaccaggtcctcctcaccctggagttcagcagaacctaaaccaggcagatccgtgtaggttcacgtgggggctctgtggccactgtggctctgccgtcacctccagcccagcttggcgcgctttggatcatgtcattcagtgccggtcctccaaacctctcccctggctctgcaggtctgggaagcagctggctcctgggtgcagctgtgaccggagcctgaactctgctccctggggtcaccgtcccctgtaattaggctgcagctcatattggctcgggcagaggccatcggctgcccgccttggggccacaacacagagagccccgtgattaatggaggctccacctgggccaagtggcccctggtgttaggcgcttttttttttttttttttttttttgcattttttaagtgcttgtaacatttcccctaatggacaatgagacgaggagggagggaggggtggcttctctgcccaggcagatcaggaatggtcaccgcctgtgtgtgcagtgacaggtctgggaacagacaagggagagcttgtccgggaggctggaccctcacaccgatgctgcctgtgcctggcagctctgtcccgggcctcagaacagacactgaccaacacgctcctcagggtctccaggtccgggtcctggtccccggcagagcttcccatccatgggaagaagcaccgagcagccttgctggctcctcgcagggagctgggatgcatttctaagagcagcatgcgtgaagcccggggtctgggcaaaggagtgtttggggaagagtctgctgttgttggagggtcggaagtagaggggaaggaggggcacgcggtaggctgaggaggtggctggcgaccctgtggtggggacgagggggctatgagcagaccaggagccagcatcacgtttctctgtctccagaatcgaggacggagagctgccagagaggccctggcggggtgtctggggccacctaaagggcgtgggtggattaaagctgaggaaagcctcattttgggggactccgtacttaacctttgaggccctcagagctgcagcctgtggtttttcgaagtcaatcacctcccagggcctcgctcctgccttcagcgacagccatttatcagggagtctttgacccaaggagacctgaaaggtcatctggtccctctcctacccccaggcaggccacacctagaccctcccacacagatccgtcccacccttctgctgccttccaccagggacggagggtgggcggccctcccacccaggccctggcggccccaccccagccaggaaattcttcctctttatctgcctcacatctcttcccctgcggcttccgcccatttcccctcaatctgctcctagtggagcagccagcagctggtttagaacccgggggtggggggagcgctagaccagtgcagcacatctgagagtgtgccagaggtgctcccattcccatagctgatttagtaaagaaaagaggaagtccagcaacttagcgccactttaaagtccgcctggaatgaccctgtggctgccggaaccaggggcacgcggtagatgacgggagcaggcacagagaggccttcgtcccggatcagtcgctgttgccctcttggaggctgggctgcctttcaagaagaggacccaaggccctgtgagcggtggcctcctctggagcctttactgtggtcctggttctgctctgcgtaaagagagatggcttgaagcagaagctgctacgtggctgtcccaggcaggcgcccgtagtcccagctactcgggaggcggaggcaggagaatggcatgaacccgggaggcggagcttgcagtgagcagagatggcaccactgcaccgcagcctgggcgacagagcaagactccgtcttaaaaaaaaaaaaaaaaaaaaggagtagagaaatctttcccagaaggcctgcagtcacctccccttcatgtttcagaggtaaaaaaaaaaaaaactgcacatttcgctttttttttttttttttgagacggagtctcgctctgtcgcccaggctggagtgcagtggcgcgatctcggctcgctgcaagctccgcctcccgggttcacgccattctcctgcctcagcctcccgagtagctgggactacaggcgcccgccaccacgcccggctaattttttgtgtttttagtagagacggggtttcactgtgttagccaggatggtctcgatctcctgacctcgtgatctgcccgcctctgcctcccaaagtgctgggattacaggcgtgagccgccgcgcccggccacacgtttctgttcttgaacaggtggctccctgaccctgggtgtggttactccaagaccttgctctggtggggcacaattctggccccaggtagggcgaccgtataacttactgtcccttgggggacacgttagtgaaagggacccttgaatgactacggtgggacaacagatgtgagctgggtttgtcccaggaaggctggatgtatgggcctcttgagccagaggagacaacagcagaaagctctgcggctgatgggaccgagcaggagaagggccggcggaggctggggcaacaacgcacttgcccactgtgaagggcctgtgtgagctgatggctgatgagagggcagtggggcgaggctgcctcctgccaggctagaccagctccaggacacccatatctccttttcagaaccggtgactcagtggctagaaggggcttcagaattgacgggacactgagggagtcgaatggaatggctggagtggccacagcaggctctaggcctcctcccgtttcttttctgtgttctgttcctggggtctatatcctggggttgctgtaacagagtgccacaacctgggggcttacaaacatagcttccggcggctcctggagattcctggcgttccttggcctgcagacgcatcaccatcatctctgatctctggcccctgtctccacgtggctttctccccctgtctgtgtgtctttctccttttctgtcttttataaagatgctcaccattggatttagggcccactaaattcagaatgatctcaccttgagacccttaccttaattacatctgcaaagatccgttttccaaatgtgatcatgttcgcaggttccaggagttaggacttaagacatatcgttttgggggacactgttgaacccactacatttaataaacccagagttggtgccaatgtcccctgcggacaccatagcagattctggaggttccttgtaaaggaatccgtaggacttcttttcccttctggagggatgagactgtagctgggctggggaaagctgctggttcaagctggggctggttcagctggtgctggcttgccaggttgttagagagctttatccagggagaaattaacatcacaaagttgggggataagagaaggtttggaatcccaagggctggctgttgaggtcagctgcccacccctttgtgttccatcttacagggacccaggcctgccagtgctccgtttctggaaggaatgctgtgggctgctgtgccccataggcagggtggagggtccccttgcagccagcgagctgctcttcctgtagcgtgcagagggaaggaggaggcttgtttatttctcttggcctcagccgaaaatccaaccacaggctctggcactaggcagacctgctcattctcacatcatcattgcagagtgagccaggcctcttgggtggggctgtgatgagcaggaaggacctccggagtgcctgggacttcttgggcccagggttgccagaggcagagagaaagaagcctcctcctaacacttgagcaaagatagtcatcagaatccatcagagtggcctcctgtggctcttccctgggtgctgacccccctggtgcatttgaagttttcagggatactattgacgctccctgcacctccatccaggggttagtggaaatggttcttttcctccttgtccagaggtactgtggatgatgaccccaggtcccagacctcagtcattgggccacgtgtgcagataagcctgggcagtcagtaacctttggccaccaagctggcctcctgcggactgggccggcactggaggcgggtcttagctgctagcactgtggcccagccaggcctggccttgggaaggcagagggggaggggactgggaaagggattgagctgggggtggggtggtaccctggttcttccctcccagacctttggcaggtttgaactatctggctgcggctctctaaggagggagcgcctcctccgccttgatgtggactttgccttctgttcacgttgtccctgtccctaaacaaatgtggctctctgtggggagcctgggggccgccctccactgacactgctgtttcctggcttccctttgcaggctccgctcagcttcactgcgcctatttttaagcctttccttttggacggttttgcttcctgagaacacacccctccccatcaccccaactgtgtcctcctccctatccggagcctgctccacctgccccaggagccacctccctcctccaccaagcagcccaggccaattctggagggctaatttgtgtccctccagaagcaggtcctgagacagggatttcagtgggaggggacaccaggggatgcctgagtgtgggaatgggccaggcagggaatccagccaataaagggtgcctcaccagctcattgtgaccacaggtggctgcccagcccccataccgggcagcatggggagactgcagaccgtgcccccagccttgtcccacctggggttgggtaagggagctggggtttttatacttcagttcttggccaaggactgcactgctcactccttccagccttccgagggcttgggcactaggaaaggctctgggtggagacacggaaataggccatgtgaagtcagtgggcgtgattggtagcagtaaggccaggacagccttggtcaccagcaaggtgaccacacatttcagcatgcacagcccccacagacacacacccaggagatggtaattacaccagcaacagtcacccctgccgcgtgccatgcctgcacccagggaatcttattttttatttatttatttatttttatttgagatggagttgcgctcttgttgcccaggatagagtgcaatggcacaatctcggctcaccacaacctccgcctcctgggttcaagctattctgcctcagcctcccgagtagctgggattacaggcatgcaccaccacgcctgactatttttgtatttttagtagagatggggtttctccattttggtcaggctggtctcgaactcctgacctcaggtgatccacccacctcagcctcccaaagtgttaggattacaggcatgagccaccgcgcctggcctcaggggcaccttattaccccatcacctcctacagcaggtgacactgaggacactgaggctcagagtagactgtggttatgtcactctcctgtttggttctcctgctctcagccctgaaataaagagcacggtccctgtgcaggcccatacgtcctgtctccagccctggagcagtccttaagctccttgaaggcacaccaggcctttgggcctcgtcccccaagtcctggataaataggaggtgaaggagcctttgcaactggaccccactctgccagcgccaaggccctgcctgactacccaccccaccctacacagatcagggacctgtgccaaggtccagtgtcacaggagagtgaagacaaggaggtgcccatggcgtacatgctgctggactcactctgtagatcctaagggttatggggagttatctgccaggtgaggttttcccgtggctttttcctgcaggctcagggtagcatacagggaggtgcttccctactccttggcaccatctgtccggcttccctgagccctgaccctggctcctagatagccagtgtttcttcagggacagaacctgctttgctgctgctcagaggagacccagtttgaccagggctagcgttcctggaacctgagcctggaattccaccctgccctgggcagaggccacgttgctccctcctacgagagctgagctgcgcatgagattattctgaccttgggctctaccatttctttgcatgacatttgtcccaggctggagcagggctctgtggctcgcttggtgttccctccccagactgaggcctgatatgtacaccaggaagtgcttgatctggtttcaggagctgggagcggtttgccaggcagcctgtggtcagagcaggggccttaacaatggtcccttgtgcggcacattcctctctaaataggcccaggtccaggctgctcctgtttcgaccccgccatgggcctggaggggaaagtttgcatctggagggtggcccactgtggcctctttttgtgtagcagctgagaccgtaggtgcttgagaataggagaagccctgtgcccatcctgggctgtgagatgtttttccagaggtggggatggggatgggccagcatgcagttacccacaccctccagcttgttggcatcaaggtctgtgtatgtgtgtgtttttttttttttaattttgtttttccaacatggagtcttgccatttgcccaggctggtctcggactcctggctcaagcgatcctctagcctcaggttcccaaagtgctgggattataggtgtgagccaccatgcccagccagtaccaaggtgtgttttttaagagcaatattggccgggtgcagtggctcacgcctgtaatcgcagcactttgggaggccgaggcaggcggatcatgaggtcagcagattgagaccatcctggctaacacggtgaaatcgtgtctctactaaaaatacaaaaaaattagccagacgtggtggccgggcacctgtagtcccagctactcgggaggctgaggcaggagaatggcgtgaacctgggaggtggagcttgcggtgagccgagattgcgccactgcactccagtctgggcgacagagcgagactgtctcaaaaaaaaaaaaaaaaaagaacaatatcgatggttttattccctgaacatgctaagtgatccccatgtagtataagcatctcagaaggcaggaaaatgtaatgaacaacacccaccgccattcattccatccagagatcgttattttctgcccgggtgtgagtgtgtgtgtgcgtgcaaactgcacatgtgtgtatgaaatggaattaggatctttgtatacatcttgtgtcctgctatttttacttaatattctcggcatttctcatcttcaaaaatgtgattttaatgatggtgcaggcctttgacatatgggtttagaaaatctgcggaaacccggactgtttccaggttttgtcagtttaatgctgatgcaaatgtcctcgtacgtaaatctttctgtacttctgattatttccttgggataaattcccagaagtgggccaaagcacatgaacggtcttcaggcttttggagcaagttgagatcggtggggattggagaagggacccagggaggcttttgggagcttgcgagattggagtctggctttaggggacttgaattcacagatgaaggagatggctggcaaaggtgggaacctcctgctctatgggtgggggggtgacactgctttaccttccagtgacagcatggggatcctcccaacatgacctggctccgcatctttctgacactgtgcacggtccacagttgtgatgctcagctgggagcctcttctgtgtccttcagttgcattaactccttgcagacagaggaggaagctgtccggtgctcctccctgctgcgtgggtcctttgaatctgcccagttgggcctgtggatctgtgcagtcacgtacggggttctaaaatctgcaaaatgacaagctcacgaacactctcgcttctgtgggtgaatgtggataccccttggctgcgtctccctccacagggaagatggagacgtgtaaagtgacaaggacctgctacccctgggcaggttatgccggttccactgtgaggatggtggcagggggcttcccaggaggcctgcacattgggaagagaggggcgaccgtgtgtgactgcaggacccagggcgcagtcttaggactctgatgggggaggagatgctggggagccctgttctgccagcctggtgacagacatctcctaatgtttcccggctgggtacaactcacaatgtcctccgtggggaggcaattgcccatgaggcatccctggcagggatgatcttgtttcattgccacatatcccagcaatgaaacaagaatctagagtgatgtgattcctccgatgacttctccaaccatctggggtttttgtgcgactccaagaagggggaaggaggcagctctcgctcctctgggctcctgatgtggcagctctggaatggccacgtgtccgttggcccacagtgggccatttgtcgaatgtggttgtggtgggattggggctgggctggagagtgggtgaccacaccagctagcctcaccctgggccactgtgcagccaggggtttcatcttcccaggggtctcgttgtgagtgtcctggggctgctggaacaaattactggaaaccaagtggcccaacaaagattgattcgctcatggttctggaggccacaagtttgacatcaaggtattggcaggaccacactccctccgacagctcgaggggaggacccttccttgcctcctccagcttgcgttggcccaggcgctccttggctctggcagcatctgcagtctctgctctcatcacgtagccctccccaccgtgtctctttgtgtcccaagtccccttctgcctttctcctataaggacaccgagcactggatttagagcccatcccaaatccaggatagtctcatcccgggatccctaatcacatctgcaaagaccctttttccaaataaggtcacattcgtgggttcttggggttaggtattagacatgtctttttgggggtcactagtcaaccctctacagaacctcagacgaaagtgaatcttcacaggctgaaatgggggtgaaggtctagtgcgtccctcctccttgggagctccctcagggcttgtgcctatcctgtgatcctgtgatccagccttttttttgagatgaagtcttgctttgtcgcccaggctggagtactgtggcacgatctgggctcactgcaacctctgcctcccgaatttaagtgattcttctgcctcagccttccaagtagctgggattacaggcgcccacccccatgcctagctaattttttgtgtttttagtagagacagggttttaccatgttggccaggctggtttcgaactcctgacctcaggtgatccgcctgccttgggcctgccttggcctcccaaagtgctgggattacaggcatgagccaccacgcctggcatttagtaggttttggttgttttttttttttgagacagagtctcactctgtcatccaggctggagtgtagtggtgtgatcatggctcactgcagccttgatctcctggcctcaagtgatcctctcacctcagcctctcgagtagctgggattacaggcatatgccaccacccctggccaatttttgtattgtttagtggagtcggggctttgccatgttgcccaggtttgtcttgaactcctgggctcaagcgatctgtccaccttggcttcccaaagtgttggggttacaggcgtgagccaccacgcctggcttagtaggttttctagaagcgcctgaggcctggtgaaggcatggtgtcatggagtagagaacattcaactctgttcccggggagccggaacacacccctcgtagccaatctcaacagtcatgacgtggccaggatgacatggggagggggtggtgtggactgtgtgggaggccagctccccgggaagggggctggagtgggcttggctttgaggaggattcccaagaggaggaggaggcggtggcatgctcgtttggggggatggcgtgagccagggtgggcacctcttcatttaggtgtcaccttcttgacattccagccgggacatggtttccttggggaagatggacacccccagagtggggcatctcctggggaagatggacacctccggaatggggcgcctcctgttctcactgttcttctagcacacagttgtattctcttgcagttctggaggctgtgagatctcctggctgttatctagaacaaactcgcctttgagcagcgccgtcctgatggtggggtggcccctgcgggtggaacagcccctgctgtctcagagcttactgagagctagtgggcatgggagtggtgctggaccgaaacacccagagggatcatagagccaggcagtaagcacagaggccagctagtggggagggagggacccatccatgaaaagacaccaagcattgaaagagaggagaggatggttggggaccggcacacatgtgcattttgcgcagatggccaaggtggtgaggcgccagccacgcagacaactggaggaaggaggagtgccctaggggaggggccagctccggttctagaatgatccgcttgtgcacgtgggcctggctggaataaatcattgcatccgcaccgtagactcaatcgtaagctcacaccagggcagcctctgctttggtgcagtgtcttcgatcatgagttggccatggtgggggtgactccaaggggactcccaaggagggggttcaccggatctcccagggaaggtcatttgttttcttgggttggacctgggacaaggccttctcctgtctagtttctgttctccaacttgaccgcacggaaggatgctgaggacacctggaagccggcccctgctctacagcacccataggacagaggcacaccatgtggggacagtttggacagtgctcaggaggcagggagcagatcagaggaccgcgggaggccctgggaaccgcacgaggacccaggcattgagctctgcactttctggcatcagcccgatgtacagtctggctctgtgtctaccccgtacttcactttccccatctgtacgggggcggtaataatattctttacagcccaggtttaagcgggtgtagatgtgatgagcttggtaagcccatctcattacattcagttctgggcattgaaccctggactttctggctggtagaagtggacattcaacctttccttggggccctggggcttctgcagaatcagaacacagccagcagtttgcatgcagggtgcagagggacagagggacaccatgtcgggagcccacacctggcacacccctgactctggggctcagtgtcctgctgccctgcggccacgtgatcagctagaggtcatggctggacccataggcgaatacagcctgtggatttgattttgtttggccctgcggtgttttattttatttttagttttagtttgtggagacagagtctcgctctgtcagtcaggctgagtgcagtgacacgatctcagctctgcaacctctgcctcccgggttcaagcgattctcctgcctcagcctcctgagtagctgggactataggcgagtgtcaccatgcccagctaattttttatttttagtaaagatggggtttcaccacatcagccaggctgctcagtgttttaaaaagggcttgttttgctttgtgccagcatttaaagatcaggagatatcatataaagatccagatttctactctcttgagaagtgaacagctctggccacgccgggcccatatcctctagggcagtgacggagctgagacagggcctgtgacaactgagagttctctggagtccacacggctccttgcccagcttctggtggaggttgagcttagtgacccaggatttcgtctgtgtccaccaagaaggagaggtgcctgtggcttagagagggcgcccacaggagtgccttgcccaggaagctggcagctgaggcggccagggttagggggttgggcttcctcttcccctccccagtgcctgagtgcatttggaggaagagagacgggtgaggggaaggcactgaaattggtcctggagcgctattattgggggctggggaccagctgtcatcccttttcctgtgggcaggggaggcagtggtgggatcccatgagacccggactctgtggcctggtgaggcagggagcggctggggagacactgtgggtctccacaggggtgcgctgtgggtctggcctggggaaggagctggtgaatgtgcctgccatgtgggtccctccctgctctggccctgataaccaggagcggctggctctcatttggagtgcggttgtggggactgtggaggtggcagcttcccaggtaccatccccactgcctccgagggagcagaccctggtggagaggcaggatggctgcagggcgggagctggtggttggcatcactgcacgggcttgtagtagtggatgggaagatgcaggagaggctgatgactgagaaagttggttcctgtggactaagctgggggagccggacaaccaagtggttagaaccttgggctctggtatcagcctgatgtacagtctggctctgtgtctaccccgtgccccactttccccatctgtactgggggtactggtattctttacatcccagggttaagcggctgcagatgtgatgagctcggtaggcccggcgcctcgccggcactgaaagctccagtgtccgcccttagtgtcattgatggggttttgttcctgctgcggttctgattggttacagttgcggtcacttattattggaggcatgtcccccgctgtggctgatggtagaggtgtgtttgctggtggtgtcccagtgtgtgccttggctggaggtgaggagggataaaaacagccgcgacaagaaggaaatcaaggccgggcacggtggcgcacgcctgtaatcccagcactttgggaggccgaggcgggtggatcgcttgaggtcaggagtccgagaccagactgaccaacatggtgaaaccccatctctactaaaaatacaaaaattagccaggcatggtggcccgtgcctataatcccagctactggggaggctgaggtaggagaatcgcttgaacccgggaggtgccgctgcactccagccagggcaacagagcaagactccatctcaaaaaaaaaaagaaggaaataaaagtcttctctggaactagaacgttcctatgtagacgtagctggagggggaggctgtgtggtttgcgccgtggccatggcaagacacgacgggcagcatcttcccactccagcctgcatctctgccccagaactcatgatggttctcctaggatggggctgtcccttccgcttgctgagacatgaaggacgggaagagacccccggccctcaccgccgcatcgcctgccttcctctgctgctccttagcaggaaacatgccggagtgttccctagccatccattcaccaattgcatcccctctctttatttttcagccttgaaaagatcttttgaggtcgaggaggtcgagacacccaactccaccccaccccggagggtccagactcccctactccgagccactgtggccagctccacccagaaattccaggacctgggcgtgaagaactcagaaccctcggcccgccatgtggactccctaagccaacgctcccccaaggcgtccctgcggagggtggagctctcgggccccaaggcggccgagccggtgtcccggcgcactgagctgtccattgacatctcgtccaagcaggtggagaacgccggggccatcggcccgtcccggttcgggctcaagagggccgaggtgttgggccacaagacgccagaaccggcccctcggaggacggagatcaccatcgtcaaaccccaggagtcagcccaccggaggatggagccccctgcctccaaggtccccgaggtgcccactgcccctgccaccgacgcagcccccaagagggtggagatccagatgcccaagcctgctgaggcgcccaccgcccccagcccagcccagaccttggagaattcagagcctgcccctgtgtctcagctgcagagcaggctggagcccaagccccagccccctgtggctgaggctacaccccggagccaggagggtgagtcgcagagcgctaggtcttggatgctgtggtaatggggggcctggttgctggctttgccacagaatcttggaggaagaagctggatatggggtggagggtgctaccctggagacccagaaagaccggaatgcatgggggtgggggtctgcaagctcaggagaggtggctctctctgtctgatgggaacatgccaagatgccccaagcgggacttgaatgagagtttggaaagattttctgggtttcaaggagcctcctttatgggtcaccgtgggccttgctgggacctctgtctgctgtgtgtccctggagggcctgggaggcttagagaatgaggagccacgcaggaaccagggcaggctcatgcaggggtgtaggacagggtggagttgagacccctagaagggctgtcacattctggtggctcctgcttgaggaattgcaggctgcctggatatgcccagcagaggccgagggcttggggaagggaggagggacgtatgcctcctgaggcttgcattggagcccatggtctggtcctcctcccccaggagggatggttgtggcagagggaggggaacatgaggagcaccttagcctgcaggacaaaattctcagggcactgggaaggggtgcctggaccagggggctgtgtgatagctgcacacggttttatttgggggtgcccttctggcgagaggagagaggccatggggctccagcagcgtcctgggagggctcaagcccacagccgtgctgacatggagcttacaggcaggggattggtgccagtcctgtgggacacagggcctgtttggaaatgccaggctgtgggacatggttgggtcccttctcagaagcgtgccccctggccccagcagggatcgtggctccatggggctatagtaaggtgccagctgggttagaagcccctcaagagccaggtctgattctgggcacaggatcagaactcagtaatgctcagtaagccttctttaggttggacaaacagcacagtctgggtttttgatttagctgctgcttcttatttctaaccgtggtgaaatacacaacatacaatgtgcaattttagccactttgcagtgtacgtttcagcggcattcagtacattcacggtgttgcgcagctgccaccgctgtccatctccggtacccttttcatcctcccaaactgagctccgtccccgttagaccaagctccccatgcccctcccccagctgctggcagccaccattctattttctgtctttattatgaatttatttgaccactctaggaaccttgtgtgtgtggaaaaatacaataactgcccattttgtgtctggctcatttcactcagcatgacgtcctaaaggttcatccgtcgtgctgtagcatggggcagaatttccttcctttcagaggctgaataatattctgttgtgcgatgcacttgtgttgtgtagctgttcctccatcggtggacccttgggttgcttccacatctctctaagtccctctttccatcttctttgacttttctttgacttttttgagacagggtcttgctctgtcctccaggctggcgtgcagtggtgtgatcactgcttactgcaacctctgccccctgggctcaagtgattccccagcctcagcctcccaagtacctaggaccacaggttgcgcgccaccatgcctggctaatttttaaattttttttgtagagacaggttctcactaggttgcccaggctggtctcaaactcctgggttcaaatgagcctcctgcctcggcctcccaaagtgttgggattataggcatgagccacccaacccctttttggtttttctttttgaatgagagttctccagtggtcagtgggcttgggggctgggaggatgtggggcctggagagggtgtgggtttggggggagaccagtgctcctcatgctttcatgggcatgtggagtgcacatttgtcttggcgggtctggggcctgggactctgcatttcctacagagggggcatcggaacacactgagtagccagaggctagtgggccttggaaggtcctttccggccctcagtgtgcgagtcccgtgttccctctcccatctctctaagcttgactctgaagagccaccctgccccagccacccagactcagtgacagtggttgctggtggcatggtgtcaggccaaaggcatgggcagtttgcagagtggcaggaggctgtttcctcccctgccttctgttggtgcaggacctttgtttgacgtgccggatacacccccatcctgggttgatgtgttcacactcagctgagtcaaacaggatgtggctggggaggcggttgtcaccgagccatctaaatctcggtgatggctggtgctggatgcacagggacgtggtcctggctctgggggacaggtagggggatgtccatggggatgtacaagaacattctcctccaggggcagacacagtttagcccctaaattgtgccagagactgtgccgggagccaggcccagggacacaacctgcgggctctgctttctggagctcaccgagccgtgagcaggatggctgggacacaaggagtgtccagggagcttccccagcagtggaagtacaatttcatcaggccaggaaggggagagaaaggcaggccacgtggaggcagcagcgttcagagctgccaggaacctggcgctctggggggacggtggctttctccatggaataggatgtacacgttggagccggggcatgggagaaaaccatcagcatcccagacccggccacccacggacagggacctgtgcaggtgggagtccagctcacgtggagaggtccgtgggctgggctgacagtcctgagggcctaagcaagtccaggtggaggaaatgcagggacagacgagggcagggccttcccaatggaggagtgctcttgaaatccgatgggagtggcttctcggggggcccaggcctgagccccactagttcttcctccgaggcaccacctgcttgcttctccgtcctccctctctgtgtcacgaccgttctggacacggatccagttctctccaactcagcttcctgcccatctttccttcaggcccatccccttctgcccctccatgtggggctgggctgggagttccctgagccccgacatgcacagctctgaccaatctctgcggcccctctgtcccccgagcaccagggatccagctggcaccatggggaaaggaatcatggagggagttccgtgccctctgagcagacgcccagccccttggcttctgcctgcgggagggcatctgtgctgtggtttgtctccaccccagagctgtgggtgcagggcagggtctcctggggccccagctgaattgctcccagactgacttccccaaagcacagcactgctgagatctcttcccgtgctgagccttctctgctcactcaccataggcccctccacggttgattcactctcctgctcagctcacacctctctccttcccagcttctcctgctttggtcttcccttggtctctcacacctttcctcacaacccctttgccctgacctcctgaaccctgacctctgcttctctttacatcactgccttggtgaactcctatgcatccctcaaaacctggtccaaatacctcgtgtttggcttgggatataaatgatttgtgtataaactttctttcctctgctagacttttttttttaaatgtgaaagtagtttttcagatcataaaaagtaatcgagtaccctttctttaaaatgcaggaagtacagaaatgagaaagaacctaaaattcacctgtaagccagcgatatccatgcttgaggttttgctgtatagtcttcaaaattcctttcatgcccccactagattctgagggtagggctgttgtctttgtttttttttgtgttttttttttgttttttgttttttgagatggagtctctctctatcacccaggctggagtgcagtggcatgatctcagcttactgcaacctctgcctcccaggttcaagcgattcttctgcctcagcctcccgagtagctgggactataggcgtgggctaccacgcctggctaacttttgtatttttagtagagacggggtttcaccatataggccaggctggtctcgaactcctgacctcgtgacccacccacctcagcttccctgacctcccaaagtgctgggatcatgccaccgtgcccagcctgtcttggtttttataaagaatcccataaggggccaggtgcagtggctcatgcctgtaaatccagcactttggaggccgaagcaggcagattgcttgagcccaggagtttgggactagcctgggcaacatagagaaaccctatctttacaaaaaatacaaaaaattagccaggcatgatagcatgcgcttgtagtcccagctactggggaggttgaggtgggaggaccacctaagcatgggaggttgaggctgcggtgagctgagattgtgccactgcactccagcctaggagacagagtgagaccctgtctcaaaaaaaaaaaaaaaaaaaaaaaaaatcccataagataccaagtaagtgacttggacataataggtgtgccatgaaattatgctgaaggagtgagccactggtggtgagttgggatggcttttttgtggttcttgtaggcagatgtagtgacccccatgggtcgtccctagagaccaagcagaaactttcctggtcaactttacccccaggacacctggtctctcctctggaggttgtgctggagggctcagtgggtgggtgttggcttcagtgtgggggttctggaaggagtcagcatttcaggagggagtgtgggcacctagatggttgaaggggagggagaggaagagaggcgctgcagagggcagaggcatccctgcctgctcctccgccccagggcctggtgaggtctgagctttatgctggtggggtggattctcggtttccgaggctctggccctgcccctggacttggcaccctccttgctgtcctcccacagaagggcgctcatcctttggggtcatccctggtcctctcaggctctgggtggggacggccttgcctcctctcctggatccctgctcttttcctgccccccaacatgggtgcctctgggtggagtggggtggggctgggctgcagcacccagtactgagcctgcaagggctggctgctggctcagagccccccccaccagagttacccccctccggctcctcagccacaccagccaagtttctccagagctgccttataaggcgggtgctcagcgctcgttcatgggtctggttctctgccttcttgggatgctcactgggggcaagagggaggccaggcccagtgcccagctcagttctgggcatgtcccagctctgccccatgagtcaactggttctgaactatcattccacccctcccagcctcaatttcttgatctgtcaaagaggcatctgcagaggtggctgggggctgagctctcatgtatccacccaccccaagaaccaagaagggagtccacagtggttctggggccacttgtgaacatggatgtgaaattggggcggggtagacatggcagcatgtctcagtagttttcctgtgacccagagggtctggaaatctttgtcatgtgggtggagcgttgagggagcagggggtcaggcccccccgagctgatgatggtgggcgtggctcttcgcatacttggtccgcaccgggccgtgtgttccaggggcagaacagggaggaatctcagcacagacagcagggctgccagtacagcgttgagtatagggttaatcaaagcacagggctccctggaaccacccaacacagagcagtgaagaggtggctttggggaaagtggggtcagagctgagcctgagtggggggtggggagggcgggcatcagcctgcaagggagggacacctactgggccccagaagttcctggtggggatcagggactgtgaagttggggagagggtgaccactgtgatttagggaggaagggccccatagacagcccagcttctggccccgtgtttacaggacaccccacataggctctgagcctatccctggactgtggactccctgaggcagggtgtgcaggttcgtccagtaccaggtgtaaggcagggggccttggtaagcgtcgagggactcactggtgtctgatgaagcagtgagtttggatcgtgtcatgcctcgggtcctgagcctgcaggatttttctgtggggctgtgtgcttctgcttctggaggtgtccagaaggcactgacgttcctgccgggatgccttactcggaaggtcccgctgctcccacctcctcccattttcctgagctgcttgcagagggcacccaggtccccttttactttgggattgggtctctttctctttccccttctaagaacaagtaccctccttctccgaactgtccctggagcctctcagacctaggtctagagtgggaagtcccgcatgtgctgggggaacaggaatcaatgcgggaggattggccaggcccggtgtgtctccttcgtggtgggacggggtggggccagagaacagagcctggctccagagcccaggaagagaacccctcccctcgccggcctgccaagcaccgtgcagtggtgagaggaaaggagggctggtccgggaatgcagcgggtgccgagcagctgtggaataccttaaatagagcgcagctgcggggaagggtggggccaggaggcaggcgctgggggcggtttctctgctccgccccctgcagctctgtggccctgaccacccagcctggccccaggatggagccccggcccccagacacatggcactgggtgaggccgcctctcagcacttgtcccaggaagtcagagcagctgccagaagagagaggagctgtgtctgtacccgccgcctcccaggcccgggacagctgccgggattgagggtctgcacaatggcgagcctgtccggaggggcgcgccgcggccagacagccatgctctgtgcggtgtggacagagggcacattcagccctggaggagcgcactcagactccccgcctcggggcccaaagtgtgggcagcccctaaccagaccctggattccagcagacagcctgggaggatgccatgtggtccaccctgacacactgtctcacctgtgacctcatttctgagagctgcagggaggcgcttcctcagttggactccacttcctctccggggttttctgtgggtgttataagtgactctgtctccttcagtccaaggggggctcctggggtatgggctgtaactgacaggctagagtagcccatggccagggctgagcttccttcccgttctctctgaacactgggcccaggaaggggttaaagtggagatgctctgattaaagttgagggaggcatggagctcccctgaccctgtccccccatcccactgctgctactgggtgtactctgtggagccccaggactcttaaagaacccagagtggagattcccggtctcatccagtgcaggtgagggggaaagtgatttgtccacagttacatggctaccatcagcacacctgggtcaagctcgattccactccacggcccctgtctgaaacctggaactggaaatggccctggaaatcactgattccatctgccgccttccaaaatggcccgcagaggttaagatatagactcctgtaatgccttgcccactcgtgtgtggggaaatggcagaggagcaccggctttgccctcacactgcctgggctgccgcccctgccctgcctagtggctttcctctctggtccgttttctcattgtggaagtgggcacaattcttcctgtgcagcgtggttagagtggacagtgatgattcgtgaagcagggtggagcgcctgggggattcgtgttaaacaagcacataaacaaaagccaacacaacccttacttaatcagcaagcaggccttgtctgaagcccctgggcagcacctcatgccatccctaggttccaggccggtggtgtcgccccgtgtctctctcacccgcaagctggtgtttagaagccctgctctgtgttctggctcccattctccctgtgacctttccctttcttcatcctaaaaagcaatgcacgacggggcgtggtggcgggcacctgtagtcccagctgcttgggaggctgaggcaggagaatcacttgaacccaggaggcggaggttgcagtgagctgagattgtgccagtgcagtccagcctgggcaacagaacaagactcccatctgggaaaaaaaaaaaaaagcgatgcccagtcattcttagatagaaaatgaagatcacatgaaatttggaaagaagtttttctctcccattccccaactctctcccaaggggtggccatgttgacagctgggtgtggcattctcctgaattttattcctgcagagtcattcagggcttgtgtaaaaaaagtcaatgtgtaaatatagacttttcaagaacacaaaggaaatcagacttctgctaccagcttttattttttccatttaacaacactgttgccacttgtagatgtagcacgttcctttttctttttctttttttttttttttgacagagcgtggcccaggctggagtgcagtggtgcgatctcagctcactgtggctcactgtaacctccacctttcgccttccgctttcaagcgattctcctgcctcagcctcccaagtagctgaaatcacaggtgcttgccaccacacctggctaatttttgtatttttagtagagacggggtttcaccatgttggccaggctgctcttgaactcctgaccttgagatccgcccacctcggcctcccaaagtagcacgttccttttaatggttgtgtcatcagctgtcccatggccctgccaggcttgtccagcttcccactgtgattgagaggctgcaacagatgttctcgcacttgtacatgtgcacacatgactgaaggatgagctcttagtgaatttctgtgtcaaggatgtgtgcatttaagttttgatctgctgggcacagtggctcacacctgtaatcccagcactttgggaggccaaggcgggctgatcacttgaggtcaggagttcaagaccagcctggccaacatggtgaaaccccatctctactaaaaatacaaaaattagctgggcatggtggcttgtgcctgtagtcccagttactcaggaggctaaggcaggagacttgcttgaacccagcaggcagaggttgcagtgagccaagatcgtgccattgcactccagcctgggtgacagagcgagactccctatcaaaaaaaaaaaaaaaaaaaaaaaattgatccttgttcctgaattggcctctaaagtggttactagaattttttaggacccctcccctcgtcgacctgctcagctgtctgctgggccctgtgcagtgatggtccagcagggaggtcctatgccccttacccctggctgagggccaaatgctctccaattggtgttttattttgtgcatctcggtcaagcgagagggattatctcttcgtatgttataggccagggccctgtgttctcttttcatttggaaggtgtatccttttcttgttgaaattttttaaaaagagttctttgtaagccaggcgtgatggctaacacctataatcccagcactttgggaggctgaagtgggcggattgcttgagcttaggagttcgagaccagcctaggcaacatggcaaaaccgcatctctgcaaaaattagctgggtgaggtggtgcgcctgtagtcccggctactcgggaggctgatgtgggaggatcatttgagtctgggagtttgaggctgctgtgagctgtggtcataccactgcactccagcctgggtgacagagtgagatcctgtctaaaaaaaaaaaagagttatttgtacatctttatcacagcaggtacgagtatcttgtccccagctgcctacttttgattttgtttctgggatgttcttctacacagaacattttaatcctgatattgtcaagtctctgctttcccttttagcttttggaattcacatcctgtttagaggtctcctgcgttctgaaattataggaaagaatttcacccacgttttcttctagtacttctgtggtttcatttttacatgttgaaatcatgaatccattggaatgtattttggtttcagcagcgaggtaggggtagatggtattgcttggatacacagcagcgagcttggtctggagcgggtggggcgtgtgtgtgtgtgtgtgtgtgtgtgtgtgtgtgtgctatttttatcagttttggtgtctgcattgtgctggcttagcaaaaacaatttggatgcatttcttttaccctctgccttctggaacattttaagcagcaacataataatctctctgttaaaacttttcaagaattcactcgtgaaaccatctgagcctgatacttttgggggagtctagcactttaaaaacttaaactttttccatgggtctgtgagtttgggagtttttctttcttcttaaaattcattactatttttttcctagaaaagtgtcttttagcttatttaaaatccgtcagcttattccgagggggttgctttagctcgcttagtgaggacagtgtgcagcgcggtgattgacatgattgatcagcagagcacgatcgatcagtcggtgtgcaaacatgactgactgtggccagcgtcctgggatgctccatgttgaggcacatgtgtgcagtgcagggtgatgtgtattctgagaggggatgaagccacaggacccctgcacccttaggagagagcccccctccccaaggctgcagtcttgagtaggtagtgacgggactgggtctagggggctgagtggtcccagcaggccaagggcttcaggaattatgagaagtttggagttgcccagagagcagctttcaaaaccagtctggactgcagcctccagaaagacatgcgattgacaccacgaaccaggacacacctatatatggggtgggggtggggatgggatgtattaatgaaaccaaatttccgtgatggaattcttacctttaccatgcgtgtgctacactcagtattttctttttttttttttttttcccctctctctttttttctttttgtttgtttgttttggagagagggaaggctttttttcatttttttttaaacagctttattgagatccaagtaagctactatacaatccaccaatttatttatttatttatttttttgagacggagtttcactcttgtcgcctaggctggagtgcagtggcgccatctcggctgactgcaacctccgcctcctgggttcaaccaattctcctgcctcagcctcccgagtagctgagattacagacatgtaccactacgcccggctaattttgtatttttagtagagacggggtttctccatgttgaggctggtctcgaactcctgacctcaggtgatccacccgcctcagcctcccaaagtgctgggattacaggcatgagtcaccgcgtggcccaatccacccatttaaagtgcataattccatggttttcagtctattcagagagtagtgcaaccatcgtcaccacaaccaattttagaaaattgaaaatttgagaaatttagaaaatttttttcttaagaagaaaccccgtagcctttagctatcaatcctgccctcctcctccatatttccttcctatctgtgtggattctttttttttttttttttttttttgagatagggtctcactctgtcacccaggctggggtgcaatggctcaatctctgctcactgcaacctccacctcccaggctcaagccatcctcccaccatggcctcccgagtagctgagactacaggcctgtgccaccatgcccggctaatttttgtattttttgtagagatggggtttcaccatgttgcccaggctggtcttgaactcctgggctcaaatgatcctcctgccttggcctcccaaagttctggaattacaggcgtgagctactgcgcctggccgattctagacatttcttgtacagagaattgcacgtttggcctttgtgtctggcttctccacttggtgtcatgtttccaaggtccatccacattgtggcaggtgccagtgcgtccctgagtaatattccaccatggcatggaccattccattgtggacagacatgttgccttcatcagctgagggacattgggttgctgccaccgctggtgagtgtattcttttcaaattaaaaaaaaaatgctggtcaccacccactagatcgttttcttggcccacagggtgggacaagccggcctgggtgagggccaggaggtggccaggtggaggcggctggagcggccctgggttgcctctgggcgcagcaggcagaggtgcaatggcagagtctgagcaggttccctgggcggatctccatgccggtaatgtttgtttattcaagaagtctcggccaggcgtggtgcctcacacctgtaatcccagcactttgggaagttgaggcaggcagatcacctgaggtcaggagttcgagaccagcctggccaacatggcaaaaccccgtctctactaaaaatataaaaattagctgggtgtggtggcgtgtacctgtagtcccagctactcggtaggctgaggcaggagaatctgcttgattccaggaggcagagcttgaacctaggaggtggaggttgcagtgagccaaaattgcgccactgcactccagcctgggtgacagagtgagactatgtctcaaaaaaaaaaaaaaaaagaaaaaaaaagaaatctccagtgctgccctgtgcccggcaccgaagccgagggaaggcagcattagtatgagctcccagcccaccgggctcctgtctggagctgacgtgcgaccaaggcacacgagggaagcatggcgaggtggacggtgcggaggcataaggagcaaaataaggcagatgcagtggctcagtggctcctggtggctgcgaggagcgtgggcaggacagccccaggagggcacctggagagcagggccggctggggcaaggtgtgtcaggcacttgtcaggagcaaaatgtaaggggacaccaaagagctcaggaatcaacacagatagtatttaatgcagtatttttcaatatcgaaatgatgcatagtaatctctatgatgaacaaatgttggaattttaaattaagacaggcccagccctgcacgtgcacagccctgtcagagtttgttcagcgtggaatttgatttgtttaaaatgttgcttcaaaatattgtttgattcctggattttttggcactgccttaacttttgcacctggacgaaggcctcaccctaatcccagctggagagggtcaagggctggtgaatttggctttggacctgcagagcttgtggtacctgagaggtggggccaggaacaggaaggagctggtgagaacggcacccggtatgggatggggccagatcagagcagcactgtggctctttccaacccgtggttttgctgctggatgcttggcgttggtgctgagcccccggccctctgaacggagtgtgatgaataacggggccggggagctcttgggcccctccctgaagcagcagtgaagccagggacatgccggcagcaggcagggagagggacgtctggtctgtgcctggagccagctgccccatggaggagctgggtgaggatgcggtgggaggaagaccttcccagtcctgcatcctccgaagcataactgagtgcttgtgtggcttgggggtcactctggtccgaggacagtcttgctttgcttagccaggctttgaagagccaccgggatacggacagcagccctgctgggtggcaggttgtccaccctcgcccactcaacgctggaactggatgcagagcacctggatggccagtcccagagtgtctctgacactcccagtcacctcatcccttagaccaggataagatgcgggatcccaacctcgagcctcccatgggctccattccatgtgctcccataagccactgggcccacctcctggctccagggctgtctggccatttggcatcttggtttcctcatctgtacaatgaaaataatagtcccagccttctcgaggagttacaagatgcctttcgtgtgaaaaactgggatttggtaccagactatctggatttgaattttggccctacccctcctaacctgtggctttgggccaatctggcctccctgtcctcagtttccccatttatagagccatctcattgagttgctgggaggatgaacataaggaagtgtactcatgtgcccagagcattgtgattttacttattattaccaaacgaggcacacaataagtgcctaatagatgctcagtgtcatttcacggattctgtgtgccttgtgtgtctccagcagccaagctctggaggtggggaagctgttgacgagttgcacgaggtaattagaaagaggaggccacaggtgcaagggtttgggtgacacctgtggacagagagaggccgatggaccctggcagaggggaagggggcccttgcacatagaaaatgtttcctgcatccaagatccttgtgactctggaacagaggcagcagaggtctgcaaattccaaatcataaacccagaaagcatagaacattcgtagagaggaccagaaacatcatatatcttagtgtgtatagaattttccacatagccaaacaaaagcacgtttctaactgaagctgttggagagttcctgaggactttataccagacaagggccggtaagtggaagttcaatacgcaggagccattccttttgttcacaaatgtttgccgtcttttctgtctatatccgcattcatgtgagggcactcataggtccaccgtccagccccatgctttgtttgctaccaaaaaatttcttaagaattcctcagctgcaaatcctcctaccggagggggggttccaggaacccagccttgctcggggttggggcacctcagcacctgctgcacaggcgttggtcattaaaggtcatgtgccgtatccgtgggccctcggggtctggtggcacctgggcacacagtccagtggcggcctcctacctgccagacactgggagtggggggctcctcattcctgttccctggcggtggggggagtgccccgagctgtcacacatcagaacccaccgactcacacgttgcggcaccttacagccccttgacagcctctcagcctgagagaccatcaaactgagttcctggagagggtggctgttgaggcctggacacaggtgtggacaggatagccctgcctcatctcggagtcccgctccggttcagcctcttgtgggtctgaagctcaggctgggccagtccctgcccctcagatggccggaaaggcagcccagccccacggcctccttgtcaggctctgagagccgcctggcctccagctctgctctttttttttcttaagatggagttttactctgttgcccaggctggagtgcagtggtgccatcttggctcactgcaatctccacctcctgggttcaagcaattctcctgcctcagcctcctgagtagctgggactacaggcgcgtgtcaccatggcaggctagtttttgtatttttagcagggaccggttttcaccatgttggccaggctggtcttgaactcctgacctcaagtgatctgcccacctcggcttcccaaagtgctgggattacaggtgtgagccgccacgcccagcctccagctctgccttgattttctcttaaggccgtgaggatgtccacgcctcctcctttcctcacggcccattgatgtctccagatgctctgcaaagccaccctcccctcgggagctccccagctggtgacgggggaccttttggggatcactgcccaggtagtcatgtaggtctgtgggccgtgcttccaggctggaccgagacccggtgcatggggtgcttctggtctgagctgaggcccctggaagccacagccaggaggcagcaagggacggctgtcatgtcccctctcccctgtctcccagggtccctgcgggacagatttccctgcctgagcctcctggttgcccataccctggcctcccaaagcccagcctgaagccttaggcaccctacaacctgcttcctctagcagcctgccctgtctcttctctgccgatgttcctgaaactttcctgcctctccttacctcttggccagagagagactggagaccctgtgggaacccccgaggggagggagaaggccgctgtttgaacggaggtggtctttccctctgcccctccccaggcgggtcacacttgcaggcccagcctcctgctgtggcagcgcttggggtgtcggctgcctcctgggcacgagttgggagctgagggaggcgctttcaggaccggagtggcaacccagctggaggaggagtaacaggcccgtggtcagcagcagccgccgcagggaccccggcgctgtacctgtgccccagctgacccctcccgcttccctagggtgggccggggatggtggtctgttgcccagcccaggaagaagaggggccgtaatcagcagcagccacctcaggggaccccagcgctgtacctgcgacccagctgacccctcccccttccccagggctggctgggaatggtggtctgttgcccagcctaggaggaagaggggctgtggcttccactctagaggtctctctcccggtccctcccccggtgctggtctaactgcaggcctgccttaggccgtgccggcacctgctgactgacgcttagcggatgctgataggagagggctgggatggggaagcagcaagtcccggtcactgtgggctcgggttacagatggttgaggcacctcctggccatccccaggaagcaaggccccacgcagcctccgactcacccactgcccgtgtgtatttcaggaggctgcatcccccaaggcccccaccaggtaacttcattgggctgggtgtcgctgcaaaaccacccattgggtgcggtggtcttctggtggggggcatggctggggaggatgcggtggaggagaagccagctccgtggttggggggagggcggactatccgtttcctgtctgtcccctgaactggagctcatggtccctcccccaggtgcctgggccatggaagaggtcacagccctgccttattcctgtggcagcctaggggagccctggccagtcccgtgtctcctgggagggcgacagcctggtcaggctgcagggcaggactggaatgcagacccctgcttggccatgctgttgcctggctgctctgtctggggaccttctgttcaggaagagagaagcgggccggacagcccggctcagtgattggaagctcagctccccatgttcagtccagcaggaagtttgcctcctcggaacacttgcgtgcttctgcatgtgtcttcttggctggtggttctgcgaggcccctactgggctgcgtcatgtcctctggccaccctggccttggtgcctggcccctgtgaaacagagatacctgggcagtcccccacttgtgcttgcaagcctgtgtggcttcagtgatggctgattctgctccacccagaggacctgggaatcctcagcccaactgtccagaggagtctttctcagtggggagagcctgagctgtcctcctggtggacagtcctttagatctcaggcggacttccctgccggccgttcctcctgctgcccctgctcctctgtcccccatctgtctcccaccctctcccctgcagcagccagctggcacggggacctccccttccctctgggattgtgaatgagacgactttcctggtccttctgggtctagatctttctggcaacagtcagtgaaacccttgtctcaggtgggaggagaaggctcagtatgtggtcacaacaacggtcctaaccacatcactctcaaacgctggctttcacttaccccttgccctgcccaacagttactttcatcatcccattttccagattaggaaatcaaggcgcagagagcttcagccacttgcctgaggcccccacagttaagtgtctggatttgaaccctggagcagcctggctgctgagctgtcctggagacggggtactgtgcagtggtcggggtaggggtggagctctgccgtcgctgactcccgggctacctggagtgataacacagcccagtgtctgggcccctgcctgagactttggctggatgccaggagcccgagaccttccagctctttcctgtgtaaggcgccatggggtgaaatgaaagaaaaccccagttagaaggtgtccccctcttccttcagtccctcagctgccctggattttgaaataagacaccgcccgtctgtggggtgagcaggaacagattggaaccgcatttctctccccccagtcacagctgccaggagctcatctttctctgtctcctccccctgccgcctctccccacaagactgggctggatgctgctgggaaagtcaacaggaagtcttttggctgcggtggaggtgggggtctgtgcttccctggggaccgagatgagggctccaggttggctccggcaagagcagggaggctcacgtctctgcctgctggttttgcttcctgtcctgggagaaggtatccacatgtcccagaatgcaccctctgcgtgtacagggatggcttttgggccattcacctgaggtttattgatctttctctttggaactggagtggctcctccacggtggattgggctgagctctctgcctcggccgacgtctttccccaggcacttcctctcaccgtgccagggtgcaggttgctagtggatgggtcttcaccctcggggattggcagctgccacgctcatttcacagtcgagacaccctggccgaaggttctgctaagctccatggagtgtagggattttttttgagacggtctctctctgtcgcccaggctggagttcaatggcccaatgtcccgctcactgtgatctcgacctcctaggctcagcagtcctcccatctcagcctaccaagtagctgggactacaggtgtgtgccaccatgcctggttaattttttaattttaatttttttttgtagaaatggagtcttactatatttcccaggctgaactccaactcctgggcttaaatgatcctcctgccttggcctgccaaagtgctgggattccaggcatgagccattgtgctcagctggggttttcctttaacccttcctggcccttcccaggtgcaggacccgggcctcagccttatgtgttcttgaacagctctgggctctgtcctgtacctcctgggcgcgtggtcaggcctctcgtgacatcagcaggagactcaggtgaagaagcaggcagaacggaatgcttgctcacccagcctcggggccaggcggggcggccaggacagtagcagtggctggtgtggcttcctgggaggtcagcccattggcgtggccagcgaatggggaggggagcttctccccttgtctcccctcatttctggtctctgggcctccagggccaggtctccagagttctaggtggaggatggaggtcagggaagctggggtaagagcgggctgggggtgggtggtcaggcggatcctggaaaaccatcctctgcaggtcccgctttccccagggagcactcagggctggtcccggggagccgggctaatggtcacctcggatggtgcaggggtccatccccatgaaaccgggcccatccccatgaaactgggcccacagaagcttttggttccggttctgttctgccccctggctcttgcttccaaagtaggactcaggatagctctgaattccctgccgaaatgcagcttcctgggccctaacccagccctccagaaccagagtctctggggtgggccctctgcttgtctagcagcctccaggggacacttgtgcctgccagagcaagtctaataagcactgctgtaaacccctcgtccccacagccttctggttcgtctcccttttcctgctgggatctgcatcaggattaaatgccaacatcagggatcaggttatacttgtgaaccctgagacaatacctgcatctttttttttcttgaggctgtcttgctcgctctgtcatccaggctgaagtacaatggtgtgatatccactcatggcaacctccacctccagggttcaagcaattctcctgtctcagcctcctgagtagctgggactacaggctcacaccaccacacctggctaatttttgtatttttagtagagatggagtttcaccatgttggccaggctggtctcgaactcctggcctcaagcgatccgcccgcctcagcctcccaaagtgctgggactacaggcgtgagccactgcgcccggcctgatacctatatcttgaccaagctgctgtggaaacattgagttccccttgatagttttgtccacagagtgaatgtttaggaaccggcgaggcatctctcacccccacccagatggcggcctggaggcagcgtttctgaccctgtgatgggatttgtctctcttgtccaagagactttagagatgtggcccctgaatgtgggggcccctgttggggtgggaacgggagctggccctggccattgtccagtgaccccatctcagtgcctcgatcctagcaccctcgatctcagcgcctccccttccccggctccgcgcggagatcacgtggcttgcgctgagcaatcctccactgcccccgtcgcgttcctgctgcagggaagcctttccagggagccagctgacacatttggcctccattatttgtttttgaacaggaatgaaaggagagagtgagtaagaaagtggcaggaggtgggggttgcagagtaggggaaggtcagagagaggggaggaaagatctggaaagtccaggcatgtgctctggaagcaggtgccagcgatgagctcatctggagggtggccgcccgccctgagccctgcctggggccagcagggaacactctgccagggcatgtcgctgggagcctgtccttggctcactttctgctgctttgagcgctgagcagatttgtttccattttagggacaacgcaaggaggctgtcattccacccctcaccttattaatatttcatgaatcataagtgaccacttactgcgtcctgacgtactccaggcgctgggctcgaagctttatgcgcttcatgggatgtatctgcactatcgccgtagaaaacggttcctgttactactgcagagaaggcaccgaggcacagagaggttgaggaactggcctcaggccacacagctagaagcggctgaccctggctgtgaacacagggctgcttgactccaaagcctgagctggtttgcagcgaggctcatggtttctgtgccactgtttgagcctctggtcgagccccttggctcagtggggggcccagtgacctaccagctgttccattatatgttgtggacacctccacggcccacctgggtgggagggaaggggcttcaggaggtgggaggggtacagggaacacagtccagcctgcttgggcccaataccttgaccttcaaggtaccccttgagggtagcatgaggctaagctcttgttctcctccaggactctgttcctgtgagggcctcggggtcccttgcttttttctgggggccttgctggtcaggatcacagagaagctctttgctgttgatctttctgcctctgtatcttttggcaagccattttatgactcagttgctttgtctgtaaaatgggttgaataacattgtcctgcctcggagggtttttgggaggatcaaatgagacctgttgcacagaagccctttgtaagccatgctgactggcggtcgccgggcccccaagtgaatgggcatccgggcactgagtgtgtggactcagtactcggaaggaggggctggggggtacctagaactcctgggaggcttggacccctgctctgctcagattctgagcttctccttggccagtttaattcccatcagtagggtgagggtaaccaggacttacgcatagttgggcgaagtcgagtgaccacatgtggaagtctagcgtccttcatgcaaagtgggcaggcggccaaagtgagctctgctccagtccccccacccccggggctgttcctggcgccctgccctcccccagagccccactgacctgcaccatgtgacccgggcctgggaagatgggcccagctgtgggaggtcgtgcgggctggggactgagagtgccggaggagggcctcccaggaaaacccagctgcacaggaagccgggccagcggcctccggaagcctctgggctttgcaagctggactccccagatctgtggctgtggggccctctcctgcctgcagctgagagcccttgacccgcacctgagggcttcagaggtccgggagggggatgtgaccgtgtccccagggtgaagcccacccgagtgtcactctggatacagccctcacctcttcctggccccctctctggtcatggggacgctgcctggggggggttcccttacatggaaggagctgcagctgagctggcgggcctcgcacacccccaaggccgcctgacttccagcctccaagtggggttgcattcaccactcaggacctggagcctcagccagagagggaccctccactgcctctttctctgtctcttgggaaaggtagggtctttgtgccccctcccacccagggacctggcatgttgggaggctaagaggaagctgccccccgctcatctaccccccaaccctcccagccagcagagttttacctgtgtgcttagaatctgtgcgtggagccagaagtcacaaggttggcccagctgtgtctgaccctggttgtgcggtcttggacagtcccagccctcctggagctgagcatcctgatctgtagaggagaggctgctgtgccggccccgcagggccctgtgcagaggggagtgtgtgcggctgtgagttcaggccatgccctcagactggaggataggatcggaacagtgggtcaggatggccagagggtcccagcctcaggaggaggcctccacacctcccagcacctccacaccaggaaatgcagccaggcccccaggcctcccatgtcaggaagcagcaccccgccccccacctctggttgcctgggcctgagaagttgagcactcctcccgaatccgagtgccctctgacccctgcttgggtagttgtccctcctgaactgaccgcctgtcctacacagtcccctgtggtttgcccgacagggtggccagcgagtcccctgcacagcacacctcccccaggagtgctgcctgtgatgatggtgtaaagggtgcccccccgagcccccggaggcatgcagtggcgcaacagcgtgagcccaggagccccggtgagctcctggatggagaatctgttcagatcactccccagcctaaaccttccctgggtgtctgctgtgcttggggcgctgactcatcgtggggcggcctgtgagaccctacgtcacctggccactcccctcagcccctgttcactgcaccggtcccctggcctggctgctcctggaacatgagggctcatcctcacggaagaatattcacttgttccctcctggaaagtccctccctagacctcctggccgcctcattcaggtcttgctgaagcgctgccatcttggagaggcctccctgtcacccgcagttaaaacagccctcccatgcctgtgggtggctttctatggggcatggatgagtattggagagtcttgccgtttatttgttcatatgccctctgggagggcaggggacactgacttgtgttgtgggtgccttgcatgtcacgggtgctcagtgaatgcctgttaagcattaggggagcacaaaggagggaagcctctgtccaactggagcagtcagggaagacttcctggaggaagtggtatctggtctgcttagaatgtggcgatttgtctgtatgcagacattagattagagggcaaaggccattatcataacttagcagacagctacaagcagctaaggaattgctatgacatggactgctcgtgattggagctaagaaggagtcagagacagaggtccctgtgctctggcgtgagtccttgggggaggctgagctcccagaatgtggggccgcctgtgcagaggccggaggtgggagacacacctgtgagtgccggtgagtgtggggtgagccactggggctggatcagaagatgggaatccctaaacccaccaaccagccttggtgccctgggagtgacaggagacggggcttctgggggactaacccagcacaagtggacgagatgggatgcaggggaaaggacaaagctctctgaggctttgggaagctgagttagggtagagccatgacagggtgagttccagaagcaacacaagaaaaaatagctagactgggttttcccttcactgtgggagatgccccacctcacttcccccgtcctccgggctctggcaatgggctgggcacagtgaatgggttccatctgcaggagtggtcacaccccttgggcacagctgcctcatacactgtattgagatgggatccgaggccgggaagaacagcttcttctgtaggttgacattgtcagccttcggggagggaaggacggcagggggcctggagcatctccttttgccatccacactctgtgcctgcctgcagggtcttgagccctgtctgttctgcctcagtcctggtcaggaacttgttggagcccataggggcagtcaggctggaacaggaggagaccaggccggcaggggagccgagagggggccctggacagcacccagggctgagtcatcctgggcctgcccgacttgctatttggagctgttcccgcttgctcatcatgtgcaaggtcctgatccactcgggtctgtttaaccagcgcccctccccaggcccagttagcctggttttcgttcgattcatttattgtcatcagtgccatccttgcaccacgtaactagcctttgcagcatgccagccaccaagctcagggccctctgtgcatctcctgtaaccctcacagcaacccgggaggcacagagaggctgagtcgctggcccatagtcacacagcaggtatggggcattgccaggatttagccggatctctgactccagggcctttccagggccttgggtgggacactggcaaggaagcaaggtatgaacactggccctgccttggacagagctcggggacggtggcctggcaggcccagctgacacagtgaccctggtgcaggttcaaccattggcaaagtgttcaagtacacacagaatctcaactggggagacaggcgaagcggtcaagggagggctgtgagtgacaggtggacactgtacctactggcagatcagctgaccttggtgccttctggagcctttcaacttccttatccagaaaaagaggaactaacagttccacccccaaactgggtgggagtaccacattcgaaattgaagcaaagctggtcgtgtcacaggctcggcagatgttagctgtgcaggcaacttagtgaccatttgaagtaggctgtgcggcggcatcctcatcttgcagatgtagtccagagaggttagggcactaaccctgggtcacacagcgacagctcaggctacagagagcagtgctggatgggagggtgttggcagcttcaggcacaggctgggagggctgtggggtcagcagagggagggcacacttcccagctggtggggttcccttgtgcctcagtactcatgtgggcccaaaggagctggaaggagggaggttagagccacccatgggttcagaagctgataagcaggttattgactctgaatttgcctcatcgtatgtaaattggggacaaatttggggatttaatgatataatgtaagaagcagacatgtcacagccctggttatacagtcagtgtataataagtggtaagccgtcagaggaggcagccggtgagaatgggagcatctcagcagccctccgccccctgctcctggttgcagatgtacctgttcttggctatttgtgccccagctccgtgtcctccggtgtgtgtgaggccaagctcctggggtggggacttgggggtgtgtctgcagctcctgaggccaagaccaaggctgaggccgaggctgaggctgaggccaccttggtgaggaggaaattgcaggtggagaagctcgttgaccgtgaccttgatctgaccgtaattttgatggtgccgatgccgtcagcacgcaggcctcctgccctcgccacgactggctcctgcagcccacctggctgagaggtgtgctggctctcgcaggttgcaaaatggggacatcaccgtccgcctgggctacagcgtgctcgccgattgcatttggggagggactgagggctgattgtgttgtggggatgttggcagagaatcagagagggcatccaaaaaggccaacagttcggtggggagaggaggcgcaaggctggttcctgttttctgggctttgatcgaaagggaacaggggacacatctggggacagtctccttcctggaggaagaagggcttagggtgctggtgtggagtttgcacagatggggataatgagctggagggtgctgggcaggagctggccagtaataggctgacgagggaggccctgctggctgggcctggttttcaagtgagcatcctgagctgcggggacccagggggtcttagagacctcagagctgagactcgggaccacagaggggtgggctgtgctcagggcaacacagcggatggggcagatgttgcgaaacctgtctctctgcctctctttctcctgctacagaactggatcctcccagctcatggctgtcaaatcctttagatgcttctgggttccatgggcgccttacactggcttccctgtaggacagcagaccctgggggttggctctgatggtattcaccatggggtaccccatgcaagcacagtgctttcacgcccagcctcccagcctgtggagtaggcctgtgtctggccagcctcactttgtggccagaggagggagacagtggttctggagacaggagctggcctggggctgccctcccagcccctgttctcccagctcatctccttgccttgcgggtgctggccaccctccccccgccagctccatccccagctttctctgcccgagccgtgacctgtcagtagggggcagtggaggccttgaaagtccttggagaggactttgaagcagtttttacaaatctgtccctggaaagtctctcctgtcacacccccagcggctccctccctcctaacatttttcctggggttgtcatgcagcggggggtggaggaacccactaggccgtggatagagcagagccatgttgacacaaaccctggctgaacccacatgctccctacagccagcggccgatcactggaaccagggaagtgacctcatagcaagggcccgcagagcagccatcacgcattcccgatcttggtttctggacccagctctggaaaagaagccagatcctagccacttggagctgcctagggaagaccccagcctggtgccggctgacagctcactggaacttttcatctgcttggccaggtgatgccaaggggcagaggttagaagtgctaagaagcaggccgagggtggtggctcacgcatgtaatcccaacactttgggaggccaaggcgggtgaatcccttaaggtcaggagttcaagaccaggctggtcaacatggcgaaaccccatctctactgaaaatacaaaaattagccaggtatggtggtgcacgcttgtaatcccagctactctggaggctgaggcaggagaatctcttgaacccgggaggcagaggttgcagtgagccgagactgtgctactgcactccagcctgggcaacagagcaatactccgtatcaaaaaaaaaaaaaagaagaagaacaagaagtgctaagaagcatctgtcttcctgattgaaaagcaatctttgctgggcgtggtggctcacgcctgtaatcccagctttgggaggctgcggtgggagagtcgcttgaggccaggcgttcgagaccagtctgggcaacagaggtgctaggggtagtggcgcttgcctgtagtcccagctcctcaggaggctcaggtaggaggattgcttgagttaggagtttgaggctgcagtgagctatgaccacaccactgtactccagctcctgggtgacaggatgagaccctgtctcaaaaaacaaaacacaaacaaaaaaccaacgtttatcttttgtgattttaaaaatcacacctacttgtgacaaaataattaaattagaaaatgtaaaggaaatgatcaataataattgcgtcctccagacaaacactgttaacatgttcacgtttccttctagtctttttctacatagacactcaatacttattaatttgttttgaactaaagatggttttctctgctttgtatgagaaccacctcagccaggcacggtggttcacgtctataatcccagaaagctgaggcaggcagattgcttgagcccacgagtttgagaccagcctgggcaacatggcgaaactccatctctacaaaaaaacacaaaaattagcctggtgtggtggcacatgcctgtgctcccagctcctcaggaggctgaggcaggagaatagcttgagcccgggaggtagaggttgcagtgagccaagatcgtgccactgcattccagcctaggcaacgggagtgaaatgctgtctcaaaaaaaaaaaaaaaaaaaaaaaagttgccacgttgtcacctctctcagggattttcatcctttctacttttcgcccaagacttgccctgtaaaaggatgaggccaaatagccatgggagggtggtactggatgttcaaaaaaatgtttcgtggctggcgggacttagaaacaggttggggaggtttcagcagagggtggaccccagctgggggtggggggcagcaggggggcccctcacatgctctctctgcgtgtttcatggggctgcctgtgaggccgtgtgaaccagagcccggctgggaagccacatgctacctggactctgacctttcctggcagcatgaccttagccaatacgctcaactatgttcccctctgtaaaatgggctaatagaaatgtccactcgagacatgatgagaaacaaaggtgttcatagagcaaagtgcttagaacggtcctggcatgacaggagcccacatgtcagtgctgccgttggcatcgtcatcatcacggcggcattggctgctttgtttctcccttgtccctgtcaccttcttccctcagcaggctctcattcacttgttcatttattcatggccgaggccccgtctgtgtcaggcctggtgctgagaacgggggtagagagatgggggctgtgccctgctccctgacccaagggttccctttgcaatgtgaagttcttggagactggaccctcaggctgttccaccagcccctcctcaggccagcttaacccttccgtgctcgttttctgagctgttagaggaagagagcgggaggaaggatggagtggggtttttgtggggactgagcggggggtgtgtgaggccctggaaatggtgcctgcggcactcacgcagcattagcttttgctgcagttgctgtttggagaatattcttggatttcaggacactgatgacagaaggtggaacgctttttctggaagccatcaagaggggaccaccgcggcggctgagcagagttgctgacttgtgagctgtggcctgaccacagtcactgttctcatgagcgaggccccctgtggtccccctcccaggaatttctggccccttggcaggggacagttcagggctgggggtgggtagtggtgtctgcaggccctcttggagtcagagaatcccctgtcgccgtggcggggctgttccctcctgcccctcccctcccgctgtgctctcagctgctccgacaggatgcttttggcctgagagacagaaaccccaactctgaatggcttcagccctcaagagaatttggagcttttttgtgcaaaatgagatgttctgagcatcgaggatgctgtgggggatcctccatcccaccatctccagccgtggtgtccctctcggtcacaggatgctgcagccacgttgcagggaaggagagcctcccttcctgtgagcctagggagcccctccatgcagccccttcactggccattgcctgagacccgacctggtggctcctgccccaaggagcagaaagggggttcgctaggtcagggtggggctgggtgcgaggaccccccccggccaacagggtctgcttaggtgtccgtcctgttggggcagcagggaagggacccacatgtggcactgggacacggagaggcttttgtgcctgtgacggccaaaagggatggcgccccagccacgttcccacccaccccgaggcccagcatggccatgccggaaatagcagcatcgtccccctcactgtcctggcttgctttcaataggccagaggggtggggctggagcgggcgtctgacctgtggctggatctagctgcccgtggacaggctgtgagtgaatctgcagaggaagggagatgggaatgccgggaccttctcctgcacctcccgaacccccgttccctgtgagttagatggggagtgcacccctgccctcccctcctgggtatcccctgcgccccccgccccaggcacttgatgttgcctgttcattttccctctctgcccctcccgctggcccttcccatatggtcctaattaggaccttccgcccgttggtggatgggcagagaggggagcttgctgtggggcctcccccgatcgggggacttcccagcacagagctttctggcctctgcagggacgctgtgtgtgcctgtgtgagtctggcgtgttagaagcgctaagctgcagctgttctgtgcgtttttcacatttctcacttctcaaaggccctgggtttggtgtctgtgggctggggatctgtgttggggtctccaggaggcccttggtgggagaggcagggccccttcccctttaatctgggcaaccttgctttggcctgctgtctgcggaaagtgccctaggatacggtggcaggactggctggggttctggctccaggcccagccccagcccctgtcagacttaccctccttgtgcctccgttcaccctgtccacccgcagggcctgcaggagcatcctgagagttggtagggtggcctgcccggcgtccgcacagggtctgctggtgggtggctgaggctgcggtgaggtctccatggctccctcgtcctgcacatccttcccttgttgtgttgtctcgctagcatatgagcccgtactgcctctgagtctgcagcctgttttccttaccaggtggctaagcagggtggcagccagggtggcagagtcccattggcctgcaggggaccctctgtgggctgcaggtagtcccctgtggttgaaggtgccctggcaggacctgcaccatgacccccgtcaaagctcacgtccaaggcatttgtgggcacccccgccccagacgtgagggttggcatcttctcttgcacgtgaagcaaaggcctgtttgaaggagcgtgtggaagcctgggtgtgatgaaggcaaggaccggtggctcacccctcttgcacctggaccttgggtggcaggcctggggccttcagtccttaattcaggagggtagccagtcgctggaactaagagtgaacttcagctgttgttgccatagctggagggaagaggggaaaggaggcgctgcaggggagcagagacctcacccttcctctgccgacatcaggctgccggtgctggacggggccctggcaaccgtggcaggagtggtgatgtccgatgatggtaacaagggcttcctgaggaccccgagctgtcttaagggctctttacctggagtaagtatcccctttaatcctcccaacaacactgtgaaattgattctgttgttattcccatttcaccgatgaggaacccacagcccagagatgttaagtaacctgcccaagcctccctctgagcatggcagagggagggtccgaatgcggaaagtctggcttcagtgcccccatccctaaccactgtcatttacctcttcggccagccctctgattgcaaaacctgaggcccagaggagtgcagtgacttggccagcttcgcacggcaggttagtggcagagctgagcagtgtctcccatgccctgattctgtggcttcttgaggtggctcacccctaaacacgccccccatggtggctctgtttcctcctctcctctgaacctgccagcctgtgctcaggcagggggagaagtagagcaaccatgccgggcgggtcgtcgtgccccagtgccgcctgccctacacctgattggcagcagagtggcccctccttggtgtggtctggaggtgccagtggtcactcatcagcacagcccagtctcacacatgtcactcccaaaggatgttgacacagaatgaagcagctaggggaggcggacgctttggcacgagggtggcgtttctggtaatccgtagtgctgttgtctgtggctgcctttggctggcatctcacctcctcctggctgtcctgcagccacctgagggaggtcagcatgtcgccttcatcccaggacagtgtgaatgcagcagcgcaagcttgccagcgccgcactgcgggatctggaggcctttgctcctgagccctgcctctgtgtaatccctaaagcacggacttcttaggggcttccattcctccacctggaaaaaccttacaccgtttagggcttgaggcagggctagagcatggagacgttgctggaggaccaagggagaactgagcgcgtgttctcttggcctcagcctcgtgtgtgtgtttatgcatgggtactttgccatccacactggcttccacggctgggtgggagttgagttgagctcggcggctgcctttccaccctgcgggcctggttggggagtgtgaggatgcctgctggaagccaacgtgcacgaaagagttaatggtggatcccatttcctcagccccctctccagctttcccagggaaagggcaggaacagagaggccttatcttcagaggaaggggtgggcggggacacagcgctgttcggcacagtcccctctgagccaccctgcatgtttcattccaccgacttctgcagcccagctgttcagagcggatccagaaggtggagagagggtttccaataagcagaggatggagtgaatgtgagattcattactgggatttggcaaagcaaagagcctcactttctccccgcagatgggacgggggcggggctggagccagcggggtgggggtatccagcaagagctccttcccatcctcccacttcctttgccatgggccccctcctccacgcagaccctcagcctggaatgatcagtgtccagcttttctcgcccctctcctgccccgctggagggagtgacctggcccctggccccggccacctacacctcctgttttgctgcactagcctcgtggtaggggctgcggcggaggtgggcaaaagccgcttccgggcagccagcccccatcctgggagtgactgaaagtccttgggggttcctgcagggtgagctgcccattctggccctggtaaggacacccaggagagggccagggtgcctgtatttggggcacagcataaagaacagccgtaagtgtttctcaggcaggagggtgccgaagcattgggaagctgggatttagaagcattgtttggggtggtgagtggaagatgcaggacacagattcacgcgattgtgcagatcacctggcctcactccctcggtttacagtggaggaaactagaggccgagagaggtgaagtgagttccctggggtcacacagcctagccaggcccagggcgccgacctcctgctctgccttcccgtgcccattcggttggcatcagcatccctgccttgacacccccgtgtggcagctgctgtgattctgtgactcctcctcaccccaccccagtggggccctgcgagggaaagaagaatgccctatgcagaagtggttggaaagcaagaagcctggagagaagtgaggcctctgtggtttggcctgagtccaggactcatggcctggttcccagggatggagcaccgacccctcccttctacacccccaccccacgcccccaggagctccctatggggaagccggaatggacctgggctcagagattgtaaattcatcttgctggatgtgtggctgcctttatgtaaccaactctctcacggagaagccaggggatggctctcagtactctcgggggtctctcagtgaggtgggaggacctcgagaggtcaggaggctgctcaagaccttctgcccctcagggaccaggtgagggcttgtcgactgctctgacctcctgatgcttctggtggggagacctcagaggggcctgccgtcaccatcgccagtggccctggcctgcccagtcatccttctggggtggccaaactccatgctgcaaaagcccaagtgaaccccagtagtggcctgggagaatcatctgtcacgagccaaggatggagtttctggggaggactttctgctgccccccaacccctttcgggtacattctcctgtagccccactccctgtaagaaagtcaggtgcctcccgaagcttctccctggccccaggccagaggtgacagtgggggccccttgcttgcgctggtgactgtggctggttgttggtgcctggccctgccctgcactgtgcacccattgaaggcggcatcatccgggcctctccggtggccatgcatgggtgagcagcccacgacacatctgcttccagcatcgtgtgggccggggctttcagaggggctgagggcttggatggccctgcaggggggtgctcctggccttgtgaccgaaaggagctgaaggtttggagaagccgttgggccgaggtcagttcttatagatttggcgaggagggaacagatgctcacggagctgctccaggcactgcacacactgcctcactctgcgctgacagccaagaggctggttccccgccgacccccattttacagataatgtgctcccccagttccttagtggtggagccaggattcgaacccacgcaggcagcctcctgggcctgtagtcctacccttcatctccctccaggacctatgtcttggggttggcaggataatgactcccagagttgagcacatcctaatccccagcacctgggactacgttaggtgacatggcagggccagctaaggtcactaatcagctggtcttaaaatagggagatgatcctggatgatccacacgggcccgctgtcatcacaagagtttttaaaagcgcaatagaccatctgaggggtgcagtgggagaggcttggaaggaggaaggaggccacaagccaagaaatgcaggtgaacagaaaatgcaggaaaacgcagtctcccctgcagcctcgggagggtgcgcagccctgtggacaccttccctgtagcctagtgaggtggagtgtgggactaatctgtgttgtttgacatcacaagtgtgtggtcatttgctacagcagtgatgggaattgaatgccattaggcagcagtgcttctatcccggaagaattaggataaattcccctgtggatctcaagctctgggagattctgggctcctctggactgctccagttctgcaatcataggaaaggtctcccatgtctgtttgggagaagaaaaccccgtagcaaatccatttccccttttgacaaatgaaggcgagggtgtgggctggacacatgtttcctttttgtggattttttttgttttaacacttagaattctgtagctgaaggagactttggggggttgtctgcctgatttgcaagtgaagaaatggaggcccagggaagttaagtgactggcccagggtcatgcagagtcatgctggaatatcaagctagatagcccagttcctgctccaaagtgctttcctccctggttggggaggagggttggagggagtggaccccgagcaacagcagcattggcaggggttggaagagtagctactgtatccaggtgctggagcctctggccacttcctgcaggaaccaggtgacccaccatggcacaggcctctccctgtctatctgcagccctgggggccccagggaccagaggacactctggcctgagggctggggcctgagagaagagatggaagtacccctagtctggcctgcccccgtggcgtcctgcaggcatatccggcagcccaggggtcctagagaacttggctggtgggcgtccccaccttgccgcagctgcaccctgtggccagcagcttgcaggacttgggctgttgcctgtggccctgaaacagtcattttctgagctgagtggggatcaggtgagcagatccccacaccttaactgctgtgatctttctgtcctggaggctggtgggcagcctggttggtgcttcatggcactttatgaccggccctgtcaccaggctcgtgagttgctcccctcctttcgggcatcctgaacggcttccctgagagccccgccctgggccttcgcctctgcaggcccccgctgcctggggcgcctccttcccctggaagctgggcctctttggggactcattaagaagggccttgccgagtgctgccaaattgccccatctggtccccatttgttccacttaccaccctattttaacttttatgtctcctccttggctctaagatctgagcaggcagggcctgtgaggcaccccaggtcccctgatgctgccagcacccaggggactgttagtacatatgcagggagggaaggaatgaaggaagagatgacttggggagtcctccagttcccatttgtaactggcacattgcgacaaaacactcatggcattttacctttttcatataccttttttttaaatttatttttatttgagatggagtctcgctccgtcacctaggctggagtgcagtagcacaatcttggctcactgcaacctccacctctcgggttcaagcgagtctcctgcctcagcctcctaagtagctgggattataggcgcccaccaccacgcccggcgaatttttgtatttttagtagagatggggtttcaccaagttggccaggctggtctcgaactcccgacttcaggtgatccgcctgccttcgcctcccaaagtgttgggattacaggcgtgagccactgcacctggctttcgtatatctataaaagagaatttgcccagaaaatctttcagatgcacctttagggttttaaggcacagatacatgaagcttgtcagtgagcagctgctgcttattcctttttctcttccaattcagagcggcctgcgtcccaagcggacagctgctcccttcctcttggctccctgctgcccacgctcccacagaagcagggagaagaggcaggaaggtgacgcgtgatcatccgctgggcgcccgcacagtgccgtctgcacaggtgccatctcctttacttgtcactctcctcgctgagccctttcccctttttgcagatgagagagcattgcctcccagaggttaagaaatgggcccagagtcactcagctgatcagcgtgcagccagatttgaaccacatcctgctgatctccatgcctgcaggcctggcctgatgagatggacagctgggtggtggagaccttgagaccctggatggctcccaaatagggcctgtagctcctggacagggagagtctggcacaaagggtttgtggagtgagctgggggagaaggtggcttagggtccctgtctctgaacaaacagatggaggggctattccagcgttttctcagcctctggtgtgctgggctcctggttctgggaggagagaatggagctggcctccattctgggctgggctggtttgggcccaattcagacaagcttcttagtttgccatgagtgacacttttgcctgccctggtgtctctgccaaaaatatgaagggtttcagaacccccaccccggcctgcttccctcccagacttggagtgggtctggggctgacaacagtctcatgccagatagcctgagcagccaccagtgccatcaggtctgacactgcggcccctgccccggagggaaaaacaaggccctctctgggggattttctgccagcttgtgaaaacaggcctggagtcagccagcgcccccatgcttagacacttcgtgtggttttcaaagtgcttttatgttgctagctcatatgatcttccccaaaaccccataagggagggcaggaagtttgagcaacagcctgtcaagcacccatacagcaggtggtttcattgccctccatttacagacaagtaaactgagcttcagggtggctaccgcttgtctcccaagccacccagccatttagccacggaagaggtcatgactttttacaccccagtgaagctgaagatttttctttccgtttttaaaaatgtttactccccagggcagtgaacacctggtgcctctgtctagcgcaagaggtgaacgtttgccacttccgtttctttcctcctaccagacctgaccctccttttgtgacgggaacatcctgcaggcagtctgtcctgctttcatagactttgagaaacggggtccaaattgccggctgtgggtgggacaggcgacactgcagtgaagaggtggagtatttttgtagcggggaagaaatacatttcctctaccctcttaggttcagtgtttgggggtctgtgaattaaactcactcaagataaattaatgagagaaaagacagatttaatcacatacgtatgggatttcactgaaaaacgtgactcaaaagagcaggtagaaggtggggcccgtgactggtccgaaggtagtgagttatctcagttgattgttcacagtcagttacagattagactccttgttccactgtctcccctcttcccacttgttttgttttttttgagtcagagtcttgcactgttgcctgggctggagtgcaatggcacgatctcggctcactctaacctccgcctcccgggttcaagcgattcccctgcctcagcctcccgagtagctaggattacaggcacccaccaccacgcctggctaattttttgtatttttagtagagacagggtttcactatgttggccaggctggtctcaaactcctgacctcgtgatctgcctacctcggcctcccaaagtggtgggattacaggcatgagccactgcacccagccaactagtcttaaaaaaaaaaaaaaaaaaaaaagaacttagggcccgtatactatcttaataggaaaaaaggaaggggtgaaagcacatattatgggccgggtgcgatggctcacgcctgtaatcccggcacttcgggaggccgaggcaggtggatcacctgaggtcgggaattcaagaccagcctggccaacatggtgaaaccccgtctctactaaaaatacaaaaattagccgggtatggtggtgcacacctgtaatcccagctacttgggaagctgaggcaggagaattgcttgaacccacgaggcggaggttgcagtgagctgagatcataccattgcattccagtctgggcaacagagtgagactgtgtcttaaaaaaacaaataaaaaaaaaaaagcacatattatggcaaaacaaatgagtttttggaaagataaataggcccttaggagctgagatgggagatgtgaagtcttgtgacaatgtcttcttaggtgtggtgtggaaactactcacatcttccagggaagagtcagttgctcccagggagcagatttgggcctgtataccatcttaataggggaaatggaaggggcaaaagcacatattatgggctgggtgcaatgtgcccagtgcaggaggcagacgtggtttatggttgctgttgaaaccagtgcagggcccgattgctttgtattgagtgttgaggatcctggttttgtatcagccatgagtttgcagctctgggacacacttgatgttggctcaaggggaaatgaggttggaggggcagggtggttggattggatgtgggcctggggccattgctgatctacaaagtggtcatcacacgggaataatagagctggctacagaccacaaccagcaatattatttaaaagtaaggtcacacttttaataataagtcacattttaagttattatcaatttataaaacacactgttggtataatgatagcttttcaagaaggatataaaaaggcatgttgggctgggtgcagtgactcacgcctataatcccagcactttgagaggctgaggtcggcggatcacttcaagccaggagtttgagaccagcctggccaacatggtgaaaccctgtctctgctaaaaatacaaaaaaaaattagcttggcgtggcggcgcatgcttgtaatcccagctacgggggaggctgtggcagaagaatcacttaaaacctgggaggtggaggttgcagtgagctgagatcgcgccactacactccagcctgggcaacagagccagactccgtctcaaaaaaaaagaaaaaaaagaaaaaaagtaaaaaggcatgttgaaggtacctgcttgtggaaagttgcaacttgacgggaggtagggcgagcacttcttagaaaggtggaaatgggccctcctgctacagagacccacaaacatagactgaggcctgcagcctaggagactcaaaagaggcaaaggtgaataagagtcaaggtctccaagtcagggtctgactctgggggtgggggtcacatatgatggaggatgtcaggagggcttcctggaggtggtgacatttaccaggggggattttaggtggggtttgcgagacagtaggacctggctgaagagcgtaggctccttagacaggagtgggaattcaggcttgaaaatgagttggccagattgcaggggtcctcgaatgcaagggaagaatttcaactttaacagaggagcctgggaagctgtttgggaaaaggagtgataaagcgggaggggtcctccagcagagccctgcatgggcaggagggagcgagatgggaggtgggtgttggtaagggatgatcccagtggtccaggggagcagtcatagggtggaaactaaccttgtggggtctgggcaggaagggactgatttgagacaccgggaagaaacagccagtaggactttggtgagagggctgggggtcggggaggggggtgtggagagtgggagcttgagtctctgaaaacagacagtgttccaagggggagacctgaggcaagatgtggagaggcagctgagctgggaagctggaacggaggtgtggtcactccaggagactaagtcagggggcgaggggacccttgggagctatctagaccccagcactagggaatacggaggggagaaggaggggagaagaaccagctggtgcgtgtcaggcactgccctcgaggtcagatggggtggggctggatactggccatgaggattttttcaagagctgggttaatagtgagacgggcggacaccagatggctcgggctaagaagtaagtgggcggtgggaagctagaagccgtggtgtagacctactttgagaggttgggctgttcagacagggagaaagttcacagtttgaggaggtagataggtcaaaggaagagggtttgcttgtttttgagattggggcatcctgaacgttctcccaggccaagtgagaagaaaccagaagaggaacatgtcacccaaatgtgctgaaacagcccagcagctgcgctgcctcacagaaaatgtgcagaggcccctctgtcccaccatgcctgcctggggacggccttcactcgggctactcagggtttccccagcctgccaacccaagggtggcaggagctgtgggtgctcccagccccttctcaaggttggtctgtgggtagaaatgtgggctgcctcggggcgtcacagctacaaatgcataccagccctcagaaccacattcctgctccccagccctttcctccgcacccccatgcagaagcgcggccgccagctcacaaaggatagggagggatattgctcttggcatttgatgggaagcatctgctgcatcccattggggtgttgcccaggatggattggaaaagagttggcaggaaggctgagctctgtgctcacaacctggcttggtggtggccgaggagcttggcaggagcagagtgcaggacctgggaactgggggttggtgcatgtgtgcacgcacgtgtgtgtgtgtgtgcgtgcgtgctgggtgggtagggaggaagctgtgaaaccacatcccctcctctctgctgctgtgttgctgtgtgtttcagcagcacgtgggtgtcaccacacttcctagcaggtgtcaacctccaagactgttctgggctcttctcccagttggctgagttggaggtgggagtcccaactgtcccctgtggcttccagagtgggaccttgctgtgggataggctggccaatggtgctccctcccctgtgacccttctgttgggtgggtcacgaggaaggactgtgggtgttgcccacagacaggtggacatgtggcaaggacaccttgggaccttctttctgacgccccttgaagggggcactttctcagctttgagatgagtctctgtggatgtgggaagttcactatctcaagagcagcagccttggaaaatccaacacagaaccccgagtaggggcgggaaggggtcctgtcccgctcactggctgcctggcagagttctgcacaaggaagcgcctgtgttgctgtgggcggaggaatggactgagggctacattcgcttcctgttgccgctgtaactgcttatcacaaactcagtggcttaaagcaacagaggctccttcctttacagtgctaagggtcagaagccgatcagtctcaccggactaaagtcaaggtgttggcagaatccattcctgcctcttccagctttgggtgggaggctctgctggagttccttggcttgcggctgcatccctccagcctctgcctccatcctcctacagcctcctccttctctgcagtcagatctccctctgccttcctcttttttttttttgagacggagtcacccaggctggagtgcagtggcacaatcttggctcactgcagcctccgcctcctgggttcaagcgattctcctgcctcagcttcccgagtagctgggattacaggcatgtgctactacacctggctaatttttgtatttttagtagagacagggttttgccatgttggccaggctggtcttgaactcctgacctcaggtgatctgcctgcctcagcctcccaaagtgctgggattgcagccatgagccatcacacctggcctgcctccctcttaaaggacgcttgtgatttggggcccacctgggtaatctcttcatctcaacatcttcagttacatctacagagtccctgttgccacatgaggtaacacagtttgggaagggagagttattcagcctaccctaggggcctgtggtgtatctcagggcccttctgattttaagatataaagcaagaaaacaaactggctcaaggggaaaaaaggacacgttgaattctgttgctttaaatgtatatttttttattgtgctaaaatgcacagaacataaaatttgccattagtaacactgagtacattcacagtgtcgtgcaaccatcagcactgtctagcgccagaactttttcatcaccccaaagggaaaccccgtatccatgaaggactcactccccattcgccctctccagcccttggcagccaccagaatgctttctgtctccataaattcatttttaataagtgcaattctgtgtgactttaaaataaataaacatgagcacgatgagttgcttattggaaggatatccatgcggggaggccggcgtgtggagtgcgtaggcctccggacgggcaggagttgaaggggcgtggatgtgccgccctctcctccccttgctctttccttggggtcactgcctgagtatccctctttgcaaatggccccaaataatgtctcagcccccacgtctgcatcgcctcctagcttcaggaccctccaccaaaaaacattccaagcttcagactcactcctgggaaaattccaatggcctcactctcccttttgagccagccagatcccatggcctgtggcgggctgcctttgagtcctgagcacctgtgagctagggaagcaggacaggcacacccagggaaggggaagagtcgtcgtcagtcacagtaattgatatctttggaatcgtctaagagatacttagcgtgtgcctaaaacattcatttctttttttgtttgttttttgagacgaagtctcgctctgtcgcccaggctggagtgcagtggcgtgatctcagctcaccgcaacctcctcctcccgggttcaagcgattctcctgcctcaacctcctgagtggctgggactacaggcacacactaccacgcctggcgaatttttgtatttttagtagtgactgggtttcaccatgttggtcaggctggtcttgaactcctgacctcaggcaatgtgctcgccttggcctcccaaagtgctgggatgacaggtgtgagccaacacacctggccacattcatttcttaggagaagctctgcattttctgaaagtgaaatgtccccaggcgggtgacactgatggtgggatctgtggcctcaccagtgtcttatgagagatgccgctgtgtgtttcaccaagctgtatcctattgtcctctaaatgtggcttgtagacatggtgccgagaatgatctgggaggttcaaatcataatatggtccaaatcaacagctctctgatgacctggtattatcctaggatcaaattgagactatccgaggatgggcgtggtggctcacgcgtgtaatctcagcacttcaggaggctgaggcgggcggatcaattgaggtctgtagtttgagaccagcctggccaacatggtgaaaccccatctctactaaaaatacaaaaagtagccgccggacatggtggtgtacgcctgtagtcccagctacttgggaggctgaggcgggagaattgcttgaactcaggagacggaggttgcagtgagccaagatcacgccattgcgctccagcctgggtgacagagcaagactctgttccccggcaaccaaaaaaaaaaaaaaaaattgagactctccgagctgcactgtccagcatgatagccactggctgcacggggccatttgaacacctgaaatgtggtgattccaagtggagaggtgccgtgtgtgtgaagtgcactctgggtttcagagtcctagcaagggggaaagaaaagaatatcaaatatctgtcatttttacattgattacatgttgaattgataatattttgggctctgttaagtgaatgatattaaaattaatatcacctgttcttacattttttaatgatttcctttttcttttcttttctttttttttttaaatatggggtctcacactgttgcccaggctggagtgcagtggcacgatctcggctcactgcaacctttgcctcccaggtttgagcgattctcctgcctcagcctcccaagtagctgggattacaggtggctgctaccatgcctggctaatttttgtatttttagtagagacagggttttgccatgttggccaggctggttttgaactcctgacctcaggtgatctgcccacctcagcctcccaaagtgctggtatgacaggcgtgagccactgtgcctggcttgttcttacattttttattgtaggtgctggaaaatgtaaggttgcgtctgtggcccatgtgccgtttctgctggagggttggaccgagggccagccgagaaggctctggggctgctctacctgaatgctgagtgtgtgctgagcggtagagaactttgagaagtgctgaaggacagaggctttgtgtgggggatgcagccccaggccggagatgccttctctgtgctctggagaccctcatttggtgacagcaagaggaaccactgcaagaggggcggccacctcagcaaagcacccaggatgctggcctcccagctcaggaatccagaggcagaggaggggaggaggctgggcttggaggagagcagggtcttgggccctgggaaaagcctggggggccagaaagctgggggacagattgaggccagaggcaaagagaagaaggttcggagaggagggccaaggaagaagggttctgcccacggggagggagaggcccacggggcaggggcgtggtgggagctgcatcctcgaggctttctgttgaccctgacacctggccagaaaggagttccttctggcatcctttgtcagcggtttctggagctgccctttaggggccagtgatgagggtgccctgggctgggctgcagacagtggaaaagacaggctcttctcactcccagtgctggggaaattagcttcttggaggaagggggagctgtattttctgagtggccgcacttcctggcctagacgtgtgtgtcttgctgtaattttggcgactggtgttggtggtgcccattttatggatggggaaggtcaaattccacagatattgagtgacaggcccagggccttggatttcagtgtttgactcagaacccaggtctctgatctgccaccagcctccctcccattcagatgggaacagggactccgggcatgcagtcttctcccagacactcccccggctctggcctggcgcccggagaccagtagcagcagctccccacggccgttcactgtgagggtggggagggccgtgggaccaggaggccttagggggaaagttggccatgaggagtgggaagcgacgggtcagatgccagtgactgctggctggggagccgctggacgtggctggcctgtttggccagtgtggcgggtgccccggggcttcagtcacccccagccacgtgtgggggtgcgggatgggaaaggtaagagtgtgtggagcccagtcagcactcaacatgaggtcccgtgggggctgcctgagggcgtagcttccagaattcagcccctggccctcagaaggtgtcaccaaaggcttctttccatttgagtgaatccctcccagcccccagcaagccctcggaacgagcccactcccaggcgctctctcctagtgtgggagtggccacgcccctgctgggagtgactcacttgggttcagaggtcgtggcactgagatgggtctggcagatcccagcgtccaggcccagcccctatagtgtcagctccctcctctggggacccccttgcttgtgcccctctgggtcccagcacatcccaggcctgcagggagggggagaggaagagactgactcactggccaggtcccccaggggctggagaggctggagaggcaggagctggatcagatctgaatccagaggctctcggaggaagagctcagggtgagctgcgcccccatcccctgcccctcctctcctgctccttctcccttccatggtcccagccagcaagcacctggggtagaggggacaaacccaggtggctgtgttccagccctggctgcaggtctgaatggctttctggggtggctggccatgctccctgagagcccagctgtggcgatgtctgagcaggtaggtgggggagcacctaggaagcaggggtgtcaggcagagcacaaggagagagggtgtccaggtcagtttcaggacctggctgagaggagggggctcctcacgggcaccgcctctggcaagcacagggacaagggcaaggacggcatggccagaggtccctgggagcctcttcccctctcttcttcctagcagctccccctcactcttcccagggaccctgtcactttcctttagcgtgtggcagctccttggcgtccctcccgtgccttcaggttgcttctgcgccgggcctgccgctgggcgcccctatctctgcctgccccctcctcctgctcccctcgccctgcccccttggagcaattccccaccgagcctcccttcccaggcagtcgaggtccctccctacctctgccccgcgctctgggaggctccttgttccgcgaccacaaagcccctttgatcctctgctcggctctgagccatgtgacccggtgggcgggccgcggctctcggcgcgtccagcgcagcccgacgttccgctgctggggtgagtcctgctcctttgttcttcccagccttgcaccactggctcgggggctctcaggtggcgcggccgcgaggcggaccctgatggccatggtggcggtgccgggagccacgctgtccctgggccccggcccgaggccggcaggaccgagcggggtccccaggagaggggtggcggggagctcgatctccacgcggggaccagattttcggcctcaaaatagaagaatagggctttgtgtggtcacagctatctctttgtaaatatttggccaactaagctgagtggctaagttctcctgctgcccggagcttcttggaacatgtttccttttcgcaaggggtttccctggcttccaggagggccaggaagaaattcgaattggccaccgctttctctaaaatcactccgctcaagttatcacccctctgggctcccgaagaccggctggctggaggctggagatagtctcaatgctcgaaatgccgtaaccgaagctccccgcggcgccggcactgggatccagggagctgctgctacagcgcagctctggattcctggatgtgttggatatgtgcagggcgttcctgggaggagcggggagggagggtgctgctggcggggctggtctgcgtgtgctttgcttctctacaatggcatgctgcgtgtcggccatgcagaggcatgtcagtgagcaggggctgagggatctccctaacggacctgctttcagagggtcttttcatgctgggagaaccccagagactaaatcatgcagccaacggggtggtccccggcctcaaagcagggaggggcgaggagctttgtaggcaatgccatctgctcctgaaacgccgtcccagtgactctggggactgactcagcctccagcctgctgcacttcatccctggcccctctctctttgctttttcatgtgaaatctgctgtgttttggtcagaggtttggggaacagctctctgctcatctaagataagtttgtaattcctttcctggagaaaaatatgccacccggaagcaggttgagcagtggttttctggcaggtctgttcggggctgtggagacagcacctgctggatcaggatggagttggaatttggtttggatcccacatgagaaaacccgttggaagaggaggaagcagaaaaaggccccattccctaataatgctgtgggttttcctcctccattcattgccaccttgccttgaaacttaatggggccacgtgtgtttccatgaatgtcattctctttggccaactcccccggcagccccaggagctccttttcaggaaaaggaagaaggtgtttgcttagcatctagtatacgagtccttgttggaaaggtgggattcttgtttctccttgggtctcttttaggctgagatgtggtcaaggaaggcctgtggtgtggctcgccttttttaatgctcgtctctggagacctgagttgctgctgactcccagcttgccccttctgtcccctggccatttctgtgtcggggtggctgagacactattgcattggccactttgtgttcccactagcccccgcccctgtaggctgtcattgtgatggtgatggggccaattcagctgcggtggggaggacccactgtgtgcgcctggggggtggcgtggggcactctgggatgagaagatgcgacttctgccctgagagccctgctttaatggaaggcgggggcatagttgcaggcagaagccatcaagcactgtggtcagaccagcattccatgtcaaaaatggccttgttggccgggcgcagtggctcatgcctgtaatcccaacacttcaggaggccaaggcaggcagatcacctgaggtcaagagttcgagaccagcctggccaacatggtgaaaccctgtctctactaaaaatactggctaatccgggcatggtggcgcgtgcctgtaatggcagctactcgggaggctgagacaggagaatcacttgaacctgggaggtggaggttgcagtgagctgagattgtgctactgcactccagtctgggcaacaagagtgaaactctgtctcaaaaaaaaaaaaaaaaagccttatctgggcctgggatctgtcctccgaacactgggtccactgtgctccacaaggactttcaccccggaagccctagacccacttgggcaaccagagtctctgggttgaccactccccagccctggccagcctcctgggccaccgtattctcccaacttcctgttgtgccacggctggtccaagctgctcttatcagacaatgcgaggcacttccacaggaggggacaaccccgtccttaggagccccttctccctgcccccaggcctggtgcagtgtgtggcttccctgccggtgtcaaaggtctcaaggcccctttaagaagcctgtcaccaccaccagcagcttccgttatctggttcttctgtacatgtaagcctttcccatacaccccggatgtttagggcttccgccctctctccctggccgggagtgtgggaagagggctttatttcaatgcttgagagtagggtcaatggccagggtaagctgtgggggctcctccccgccggcccctctctgcagccctcaccttaacacagagcatcgataccacctgggctttgggaagacctggaggctgaccaccctggaggctcccagcgtcccacagccactctttggggaagaggcttcctgagggacttgtggcccttggctgggactctagtcccagagttctgccttccggcgccgagctttgatttgtttattgagtgccagcccggttcccggacaggtagggacctgttcccggagctcagcagagccttgggaagctttcccaggagggctcccgagggtggcggccatgcccagtccgctgtacgtgtgagtttgtttgatgaggaattggctgggaaggcgcgggtctaattacaggcccatgagggtccctctcgcccccacccaggaagcagcggagatcctggcacactcagcacctgggcctgtgcctgcccagctgctggtggaatcatgggagccttgctccggggcctgtagagcagcagtgggaaccttccccacctcagcccctcccagagttggctgttcaaactcgccgccgctcagcctcttcctcctctctttcatcaaccctgggaatcgcacactgcccaccccaccgggccccggagcgggtgcaggaagagagagcttaacacccagaggtctgggccttctgcaggcgcctgagctgctgtggcctgagctgggttccctgctggaaccatcacagtagacctaatgatctgcctgcaggagttgcttcatcccagccgactccggggctgcgggaaggggctgggccttggttttgctgggggtggggggtcagtgcaaagggcctgaaaagtggcagaggtgatggcccatctgtcctccccctggccggccggcctaaacgcgattggctctctttcttttttttttttccctcccttttccctataaataacactaaatgcgatttgtcaatgcattcatttgggttcagtagttggaccatgggcagaagcactccagatttgtcactttccctaagctaagggtggggaacaccctctgtgagatcttggctcctgagcgcccaagactgctcttggaaccccaactctgggtcggtctcaggggactgacgttgatggagttgctgacattgacctccggcctctgcatggccttcaggaagggggcccttcgctctctgtcccgtcgagcctggctggcagcactcccttctcaggcctgtgcccccggcagggcctgctgcccccgccctgctctgtgggtgccaggctccaagcaccaggtgactcggtcactgaatggtcactgaacagtcatccttgctggtgtccccagtggaatgtgcatggacgtcctccctcccccagatccttgtcttttatctctcagcctttgttccaggggccaccacaggaccaggaggtacgcagacgtgggtggcacatccactgggcagattcagccctgaacctgcacgccccctccaagggggcccccagcgggcggggttgatggtgccgtctctctctctgtcactagaacggacatgaggattgtgtcttgtcgatccacgtcctgagttcccagacgtcataggtgcttgctcaacgagtgtttgaatgaatggtcagcattgtgtgaccgcagattttcaacttttatccaaatagtttgtggtttctgtgaggctatcccgagacagtctcacaagaatctccattctccctgcacgctccgcacaaggtctccttggggggtttttcagaaaaagggccaaagagcagcatttcctcggggatttgaacacgatctcccccggggcaggggactgccctggaagattcccggcaccgcttcccatgcgccacgtgactaggagggtcttggggcaggatggtgtcttttgtgccttgtgtgctggggccggaggaaacactgcccgtggccggtgtcatctgccagccctgaagactaatgatgggctggacagtggccccattgagtgggagggagaatcgctgctgtctgtagctggggggccgggtgggtgggagccgaggccagggagaacagcgcagacctggcacggagaggcctggaggaggagcagggggtctcagccacccagggtgcagggacgccacacgaggagcaggtgtggtgtgcgtcctcctgcgggttctccacctcttggcttcgttacctgcactaggctttgtggtgagagggcacagagtggaggaaggtgccgtggctagggcaggccacacgctgtgctaatggattgctgttacctgtcgcctctgtggttttgctgtcaggatcctccagcaccaggtccccaccaccaggtatgggccccacaggcactactggctccccgaagccagggacagaccccatagacaatactgagtccctgcagccagggatgggcccccacggccagtaccagatctcagggaccagcaccgggtacccacagccagggacaggcctccatggccagtaccaggtctcagggaccagcaccgggtacccacagccagggacgggcccccatggccagtaccagatctcagggaccagcaccgggtacccacagccagggacgggtccccatggccagtaccaggtctcagggaccagcgctgggtccccacagccaaggacaagtccccacggccaataccagatcccagtgaccagcactagatgtccacagccagagatgggcccctatggccagtaccaggtctcagggaccagcgctgggaccctggatgactgaaggagggcacggttgactaaagctgcaggagccagcctggccatcctgaggcactaagccatcactgcggtctcaggggactcagactcctctacttgtcttcttgaattctggaatcagacacacctgggtccagcctttgcccccggggctgtgtgcctgggatggttgcctcacctccctgaagctcagtgagatggggacggctgcacagggcccggcacagatggcacccgatggcacagggtcacctgcttgcatccatacagcctcggccctcgctctggctgcgtaccgagagtcccatgcccagacctctgctgagtctccaagctcctggtcatgcctcaggcctcccgtgagaagcatcactgcatggaccatgcctcgggacctcaccttgggctgggaagcttgctccatctccccaagtctcccctagaggcgccccatgtcccatcactctcactgcttgaggggtcagataggggaacccagtgtgggaggcccagaggtgccggagcagacgttaagcgagttccgtgtttatgcgctgggccttggcagacaccctgaatgagcctcttccccaggaaggagattggggtcccagtccaagttgtggcctcaaaccctgtgaccaagagtggagaaaaggcaagacccctcctcccagtcttccagaacagccgatagtggtggaaacatggggttcacactgaatttccttgtaacttgttgaagagaatttagcccacattttcaggggtggaggtctggccgatttggcagtgtgcccgtccccctggccacagtttactctggaccgggcaccctggtgccctccctcagtgacgcagtgaagtcactatgacgtgtttagttggtgagaaagtgcctcctgtaatgttttactcttcttagagggtgaataagccttgtttattataaataattatttacagaatacatgaggtttaacctaactctgggccacggcagcgtcccctgggtaaacccacgcgccaccctagctagagcctgtgcccccacaggcttcctggactcaccctgaaggggggctggattttctgcctgtcccgatgagagggctgcaggacagtccccagcgagcccttctgagggctgtaacctcttcccctggtattttcctgctcgccaggaatgtttcaagcttccagcagaagcctacccaccatagtcgctttccaccctgctcaccatccctcctgccctcactcattcagcagaccccgtgcacagcccagtgcaggactcagggtgggaaggtgtcccgggtgggctggagcaaggttcccagccagggcggggtcccaaggtgggtccacagccaggactgtgatttgggaggcccctccctgccttgttccagccccggcaccgccgctgtccttgtgctcagtggagactcactggctccaggctctaaaacctcagcgaggtctgcagacagggaggagccccactcgagggtagagtgactgccgggtccatttgcctgttacgaaccacgtggcctcagacctgccattcctcctctcctagagctatggtcttttgtctgaaaaatggataatgatggttaccatgtcagggaccattttgaggacaaacggggatgaaactgaagaggctcagcacggaacctggacacagaagtgctaattgtgtgttaccagctgcggtggctgccaaggcccaaccacatggcagccacgggctgagtggcgggcgggaagtggggagcaggagcatgcaagatgggcattcctgaagtttctgatccagtgagataagtacacacccagctctaagatggagtgtcccaggaaggtggagactgcaaaggccttgtggcgcaggagtgtgagctgcacctctgggctctctagaatttcaccagagctcagggaggaggtcagctcagatataggggcaacgggagagatgggagtgagaaaatggcttggcgtctggaagtggagcctggaaaggtgggcgtggggacagaggagggccttgggggccatgggcccatgcgtccaggaggtggaggcagtgaacggggccacggtcggccccacacgtggcaccaccagccctgctgagcctgcacctgctcctcaggccccctgagtgccactaccacctggcaccccttggtctgattcctgcttcctgcccgcctgggaagagtgagaccacttgcctaaagtcccttagctgtccttaaccattctggctgcctcctggccctgtccagggttagccgttgacctgaactgcctggtgccacctccccagactcctggggccttgccctggcaccaacagccacctccatcttcatcattcactcgcacattcacccagcagtgctttttgggcatccactcagcaatatcaaggcgctgagatgcggctgtggttaagacccgggcccggtctgtgaggacctcgcagttgccatttccccagagcacagccccagccaggcacactgtggggtccagaaagagaaactaatacattgtgttcgtccattttgagttgctataaggaatagccgaggctggggggttatttgactcacggttctgcaggctgtacaagtggtgccagcatctgcttggcttctggggaggccccaggaagcttttcctcatggtagaaggtgaagggggagctggcacgtcacatggcgagagagagaactcccagactctttttttttttgaaatggagtctcgctgtgtcagccaggctggagtgcagtggcacaatcctcggctcactgcaacctcagcctcctgagtagctgggattacaggcgcatgccaccgcgcccggctaatttttttgtatttttactagagatggggtttcaccatgttggtcgggctggtcccaaactcctaaccttgtgatccacccaccttggcctcccaaagtgctgggattacaggtgtgagccacctcacccagccctcccagactctatagcaatcagatctcccggactttgtgaccgtggggagggcaccaaaccatccatgagggatccacccccatgacccaagccccaccccccccaggccttacctccaacatcagggatcacatttcagcatgagatttggaggggacaacgtccaaaccatatcacacgtgacctctctgtgcgtgcgtcagtttctacatctggttaagcagtagaagctccttctctgttccttgttgagagagcggtgggggagaaatgactcagggatgggaggctggtcccccgaggggccctggtgtttgtggagtgggagtgcgggaaggcccctacgttgtgtgtgccgtgctgggctggctcctcacagctcaccgtggtgctccccgaggactgctggggaggaaagagctaattaacttggggacccagctgctgaagttatcattaaacttgagcagtccaggggcccctctccttctgggtcctatgtcacccagcacagtggggcttaattgaattttttctcatcccccaaggctcctggctggcgtggctggggtttgggatacggggagcgagagggcttgggcctcttccagatttggagtgggttcaccagaaatggcccaggaaaccgcgggggccacccccagcagctgggggctcctgtggtcatttcctcttggtcctgttgagcagccctggcccctggagccctcagcaagggatgtgggggcctgccaggccagggtcctcactgctgccgctatgcacagctgcatcttgcatccggggagtggggtgccgagtggggtgtttgggaggcaggttttcccttgtcccttctgcccagagaccttggggatgagttgagtgagacccttccggcttctgactggctgtgtttctgttgccatcccccactccttttaagtggaggtttatgacttccttctttatttaaaagggtcatttagtgacttagcagatcccagtctgtgttacccagggcccttttaaaaatctgtggggaggctgggcttggtggctcacacctctaatcccagcactttgggaggctgaggcgggtggatcacctgaagtcaggagttcgagaccagcctggccaacatggagaaaccctacctctagtaaaaatacaaaaaattggctgggtgtggtggcacgtgcctgtaatcccagttactcgggaggctgaggcaggagaatcactcaaatccaggaggcggaggttgcagtgagccgagatcacaccactgcactccagcctggacgacagagtgagactctgtctcaaaaaaataaaaataaataaataaaaataaaaatccatggggggacctctgtgtccattggctggtgtgaggagagggtgaggagctgcagagaaggtaccaggctgaggaccgcccccacccttgggctacagaattgaaggaggggacacatgaaagatgttcctagactcgggctggaggctggggacatccgagggcaaggacgacgctgtccctgctcttgtttgcagaggagtgcacagggctcaccagcttcttgttgctgtttaagtgatagctttatggagatagaattcacatactgtgacgttgacctttttaaaatctacagttcaatggttttgctgtattcacaaagtgattgtattagggtcatccagagaaacagaaccaatagaaggtgtgtacgtgtgtttagataaagagatttattattatgaggagttggctcacctcattacagaggttggcaagtgccaagattggcagagtaaatcagcaggctggagacacgggagagcccatgttgcggctctggtgtccacctgaaggcccaagacccaggagagccaatggcgtcgttccagtcccgagacccaggaaaagcgcatgtgtcagtttgagtctgaagcaggaaaaatctgatgttccaggttgaaggcggttaagcgggaagaattctctctcactcaggccttgtgtcctcctattcagaccttcaggcctttgtcacaaaattacaaagacctgatcagaacaaaatctgagaaaaaaccctttccttctatcggttttggattcattggctgggaccctggaaattagactgacagagattaacaggaaacaagcataacaattcaagtaagttttacttgacaccgagccttcataaggaaatgaagacccagagaaaccgttagcctgagcggtttttgttttgttttgagacaaagtctcactctgtcgcacgtccaggctggagagcagtggcccgatcacggctcactgcagccttgacttcctgggctcaagctggggcccagctgccggccccgggagctgctctgaacccactcttaagtcccagctcagactcccaagtagctgggactacaggcatgtgccaccccgcctggctaattttttattttttgtagagacagggtcccactatgttgcccgggctggtctcaaactcctgggctcgagcaatcctcctgccttggcctcccaaagtgctggggttacaggtgtgagccactgtgcccggcctaggcctgaacagtttttatttgttttgcttgttttttaaatttgtttgttgcttgttttgagcagtttttttgtttatttcttttgcttgtcttttgcccaggctggagtgcagtggcatgatctctgctcactgcaacctctgtctcctgggttcaagccattctcatgcctcagcctcccaagtagctgcgactacaggcgtgtgccaccacacccggctgatttttgtatttttagtagggatggggttttaccatgttggccaggctgttcttcaactcctgacctcaagtgatctggccaccttggccttccaaagtgctgggattgtaggtgtgagctgctgtgcctagcctaggcctgagcgtttttatgctgggtttgatgaagagtggaaagtcgtgggaaactgtgacagagcaacaaaagatgagctgaacagtgagcccgtgggggtctcggcaagacctgtgtactggggcccctctcagatcctctgtctctggagatgaggctgttcctttccgctgggtgtagggagggcacctcttacgtgaggggcttatgatctacttcagagaaggggcaggtcagtgagttcttcttggacctgccatttcttaaattccttcagctgaaaatatttactatgccaaggcactgtatcttggagtgtgcgttccaagccctgttgccttcaactgatcgggtgaggcccacccccatcagagcacacagtctgctttacccaggctcctgattgcacccttttcctgtttgccccgagaatactcaccagcagtgcttgtggctgcagcgttcaccccaagataaatttgccgggaagtatcttgcttttattattattttcacatcactctagtatatcgactttggaaacaaaagacatcattctgtttatagcattccatttttagtagtggtatttcctttaaaaaaaaatggtaattctcagctgggtgtggtggctcatgcctgtaatcctagcacttgggaaagctgaggcaggctgatcacctgaggccaggagttggagaccagcctggccaacatggtgaaatcccatctctactaaaaatacaaaaattagccaggcgtggtggtaggcacctgtaatcccagctacttgggaggccgaggccggagaattgcttgaacccgggaggcagaggttgcagtgagccgagatcgcgccattgcattccagcctggacgacagagcaagattccatctcaaaaaataaataaataaataaaatttaaaaaaaaatagtaattctcgatcgctgaaaatgtcaaatcctagagaacacagcattcctacaagtgatgttaacattgttcttgatcagttgttggctgaagattcatttgatgaatctgatttttccagaatagacgactcagatgactctgttgttttgcttagaaataactgcaggaacaatttaaaaaattttttttctttttaatttttttgttttttgagacggactctctctgttgcccaggctggagtgcagtggcacgatctcggcttactgcaacctctgcctcctgggttcaagtgattctccagtcttagcctcctgagtttagctgggattacaaggtgcctgccaccacacgtggctaattttttgtatttttagtagagacggtgtttcaccaggttgaccaggctagtctcgaacccctgacctcaaataattggcccatgtcggcttcccaaagcgctgggattacaggcgtgagccaccacgcctggccagtttttatatttaattttcacacagagcatccagtcagatttgcttcagcctcaaagagcgtgtttatgtaaaattaagtgagtgctggcagtgagctgaactttctaaaaggtaaaagggttaaatattaaactcatccaaaaacaccttcacagacacactcagaataatgtttgaccggttacctaggtgccccatagcccagtccagttgacacagaaatttttttttttttttttgagacggagtctcgctctgtcgcccaggctggagtgcagtggcgcgatcttggctcactgcaagcttcgcctcccaggttcacgccattctcctgcctcagcctcccgagtagctgggactacaggtgcccaccaccacacccggctaatttttttttttgtatttttagtagagatggggtttcaccgtggtctcaatctcctgacctcgtgatccacccgcctcagcctcccaaagtgctgggattacaggcatgagccactgcgcccggctgacacaggaaattaaccatcacagttacacagccatcgccattaatcccagcacatttcatcatccccaaaagagaccctgcccccattagccaatccccattcccaactccgggctctcagcccctagccaccgctcatctgccttcgtctctatgaattcacctgttctagatagtttgtataagtggaatcgtacagtatgtggccttggtgtctggctcctttcacttggtagaatattttcaaggctcatccacattgtagcaggtgctggtgcttcattctttttcatggccgaataatattccatcgtggatagaccacactgtgtatctcttcatctgctgatggacatttgggttgtttctgctttttggcataattctgttgtgaagaattctgcagtgagtgctggtctacaggtttttgtgtgaacatgttttcatttctcttgggtaattgcaagatcatgtggtttagccaaccagcctttaagccatgtgtctgctgagggacccaggcctggtgggggtgcattgctgtgcttggccagccaggtgctgcgagtccgtgtcgcagccatttctctgtgctgtgctctgaggttgtctcgccggcaccgggcactgtgagccccaggaggccaaagccccctttgttttatcttgagtccaggcctcgctccatgaactaggatgaatggacattgaatcaacgcagggatgggtggggctggggtggggacgcagagtgaccccgggggcctgcagctgggtcctggctgctgacttccagtttcctttgcctgttggagcccagaacaagtcagaaaggggaaatgcaaagttcgagtgtcttttctgtggtagactggcaggcctgggtgggtgagccacttgcagctagttgcagcgtgagagaggaagtgggaggggagggagagggtgagtttggtgtaactcacccctggaaggaggctgggctgaggctgggggaagtgacttttatttttctgagaggattcttccctggggccaacttcaaaccaagggagacaagaccttcctgggggaggctggaagtgctggggcccccaggtgggcaggtctcccagggccaacgtcttggggaagctataagttaccatgtttctggactgtcacacacacacacacacacacacacacacacacacacacacacacacacacacgagtaaactgtaacacaaatgtgtgcccatgaaagtgcccactttaaaccaccacacagcctgtaaagcgaaggccctggcccgcatctgggcacccactgcccagccagccggtaggcagtttgcactgtagtctgttaccatccctcagagatgcagccgaggagcccagctggcttggagggcccagtgggcgcagcctcaggaaagtggtcaggcccgggccaggccccttccccctcccagccttgggagaaattaccatatgaatgtagctccttcccggagttcgggctggaagggcctgggaggggacaggctcccaccccaggagcttccaggttccggctgctgcctgtgttagctgcgtgagcgtgagcgagccaggggtcactactgggtggaaggaagaagcgggcatttcttccaggaggtcaccgttggagtcccacagtaggtcaaccccaggccctgggtcctcgggaggaggagaaagaagagaagcaggaggtgtggagggtaggccaggaccagaaggcacacagggtcggggcagtgtgggagaccctgggggctccctcatttaaccagctaacatcacagcgttcataagaacacgctattactgcagttttattactttgctctgatttcagaaggcacaactgatgactttagggaacggagaatctgaggaaggcctcgcaggagagggtcagatgcgatcgagtaaatgtgagccgtctgtaaactgtagagtgcacgcacagcaccggtcagccctggggtcagtgttcccctggtgctcagctcggcctctgcaccttttagtgctcggctgggctctgtgggggtcagggctgggtctggtacattagaggacttctaccaagcccctggcagtgtctcagttactaaatccagtttgccagttactaaatccgctctgccggttcccgaatcactcttccgctggggccggccatgtcacgtcaggcttttcatgcaggacggcagatggatagacgctgggaccaagtcatccttgggccgcgagacgtctgaccttctgctggtgtctcagaagatgctagctctccgtggcatgtcttccacgcggtgcttggggaccagtggcctctaaggggcccccctgcctcagcgtggggagtggcctggccaaggtctcagtgtctggttggagccaggcataggctcaggtgtactggctggaggcctcctgcccatgggctctgcctgtcctgtgtccctggtccttactgtgtcttctgtgttcctgggagagaccccaggggccctgagcccagcactggggttggggagtgggcggggaagagggtggggattagggtccctggctgcagaacagccaggccccaagtccccactccactcccctcccaccgggcgcctcatcccacactgaccatttcctgaagaaaatttcctgaaccggcctcccaccccggctgtcccaggaagcccatccatccttccgccttaatgctttgtggctccagaaggatggtggaagccggaaatcatgagtctcattcacaggcggccacacaccgaagccgcggagacgccgtgggaaaggactctggccagcgcggccggcacagagggagcggtgttaccggggtagacgggaaccgtggctgcccccatgctggtctgggagagacgaggggccggacgaaaggacagcagactggccattcattcatttattcattcactcattcacagcgtcttactgggtgcttcggacgtgtaaggttttgtgggtagtgaatgcgacagaccccagacagcaatcggagggccacgtgtgtaagaactgagggacctaggctgggcgtggtgtctcaagcctgtaatctcagcactttgggaggcagaggcgggcggattacgaggtcaggagatcgagaccatcctggctaacacggtgaaaccccgtttctactaaaaatataaaaaattagccgggcgtggtggcgggcgcctgtaatcccagctactcaggaggctgaggcaggagaatggcgtgaacccgggaggcagagcttgcagtgagcccagatagtgccactgcactccagcctgggcgacagagtgagactccatctcaaaaaaaacaaaacaaaacaaaacaaaacaaaaactgaggaacccagtgtagatgagctatcccgggaaaacaagtgggagttctaggaacagcatggggaagggatggtcccggcagggaggacctctgtgggtagccttgttggaagagctgaaaggcagccagagaggctgtgcgtggatggaagctgaagagtaggttaggggcgtgtgttttgttaacaaagacttcaagcatttactgaccaggcacaacactatgtgcttcataaataaatatctcatttgatccccagcattcttatgagacagatgttattatcccatttcacatgtaagaacattgaggcacagagtggttaagttacttgctcagggtcacacagcacgtcggtggtaggcaggattctggagccacaggaatctggtatatcccaggtgcaatggaaaccagtcacggcttcatagagggaaatcatcagattagtaaattttacacacgccccctggtgctttgaggaggagggattcggacaggggcagctaatggtggtggctgtgagatgtgttgggttaacattgatgagagtttgggatggatgagtggattcggagtaatggaaatggagggcccaggcccggcccctggagatctagctgcaatagctgttggctggagaggctgttcacttagatgggggatggggtgggaggcaggtgagatgagagctccagagttcagcctggggcacggtcattgggttcaagatgccttcagatgttggggcttgacagtgacagtggctgcagatacccaggacccagcagagggcctggcacagcggggcccagggacacgtctgtgagtcaggctggcactcaagtgtgaatctggacaaagaaggtggcattgttggcattgaatgctcaggggctgggtgaagtcagctagggagaggggctctcaaggcaccaggactgactccgtgggtgagggcggaggaggagacggcagaggctgagagaatagccagagacaggaggaaggtcagcagagccatgcacagaagcctggagaagatttgaggaaaggaagggctgggtggtcgtcattccctgcagctaggaggcaagggtgacccctgtgtgtttcattcttcagaggattggtggctccatctggtcagaaccccaagtccagagatgcatctgagcttcatgccatggtgcaggcagcaggagccatggagcaggcctgcggggtcacggcctgcctgctgcttcctggtgtctctaccctgagctcaggggttgcttggatgccctgtgctgcatccccccaggcggtgttccagagaggatgaaagtggctatctcaaggtgtgaccaggtagcggtccatgcacactgctttttcctggggagagtctgggatggaagggtatgtgtgtgtttctgagactccttgaataggctccatgtacctatccacccatcttaccacccacccacccatccactcactcacccatccacgcacccacccatccacccatccactcatccacctgtcaacccatctatccactcattcacccatccactcatccacctatctacagtcattcactcatccacccatccactcatttacccatctatccatccactcatccacctgcccatccactcacccacccatccactcatccacccatccacccatctatctatgcactcatccacccatccactcatccacctatccactcattcactcattcactcatccacccatccactcattcacccatctatccatccactcatccacccatccactcattcactcatctgtccatccactcatctacccatccactcattcacccatttatccatccactcaaccatccactcatccacccatccactcatcatccgtccactcacccatctatccacccatgtatccatccactcatccacccatccactcatctgtccatccacttatccacccatctactcacccacccatccactcacccatccatctacccatcctctcatctatccatccactcatctacccatccacttatccatccatccactcatccgtccatccactcatccacgcatccactcacccatccatctacccatccactcatccacccatccacttgtctactcatccactcacccacccatccactcatccacccattcactcatctactcatccactcatccatctatccactcatccaccaattcactcatccacctatctactcatccacccatccatccagtcattcatccatttgctcattcatccgccaacccatccattcacctgcctgttcatccacctacccatccattcatccatctgtccatccatccacccacccactcacccattcacacacccatacacccatccatttatccaaccatccatccccatccttacttcagaaagcatttgaagttgctggggtgtgcacttggaaaatgcgtcataagctttcataggcctctctttggcttcctcacttctttgattggtctttctttcggacatgcaggattctgagcagctcttctgggaggtgggtgcagtccaggtaggctgcctgcaaagctaggaccgagggagccacatccaaggcactgtgggttcccaaggcgatggcactgtgggcccactgcttccagacctcctcaactcccaggctcctgagcaggaggactcctggggcagggcctggagacgggaagagaaaacaattccagtctctcaactcttgtcagtccaggtgggtgctgcatggattgggggcacctggaacagttggccccttcacccctttcccccacctttccagcccctctggctataatcagacagttgtgtgcgatgtctttctccctcctgaaggggtcatttagtcaggctcctactcatggcccaggaatgtgcccctccctgcctgtcccctacccccaagcaggccgtgcctccagccccctgctgtctctgaagggcctgggcatggggcagcctctgcagcatccccagggcccgagctgatctgcacagcagaagggaattgggggaaagctttttttctacccagcacctggcagggggccaccctgttgcaccccagagacccttgtctaagttttgttatttcagatgatttcataagttgggggaggcggagccccagcccccacagcccctgttgttgcctcactgctgagctctgctgtgtatctgctgacaggtctgctgatagcagaaggggctggagagagggaagctctgggccctgccctccccaacccctgcttaggggacatccctgataagaggaaattccagcctgtgacagatggccagtgtccacccacccacgggggaacttttctttctctttgtaagtttgcagatttgccaggaactaaaggaatctctggttgacaggccactgtggacatggctggagggctggcacgggctggatcttggggttgctttgaggtaggggccgctcctgctggaaggttccttggggtggggaaggcatcagggccattccctgaccctccctctgcagtggatccacttcagagcctgagacaaggcaagggggcagcagaaaacagaatataaaatagccccccccaccacacaccgcaccagaagtcagaggattcatccttggcctgccctccctgcagcctaagttctgagagtggctctttaggaagtgaatggtgatggtttgcaggtcagagcttgctctggcccaagattgatgtctcaataggccgcggagcctgggtgaaaaaactcaggctagggaggtggtgggttgcaaatgaaagaacagaggagggcctcttccagaaagcggcgggtggtgtgaggagcccttggaccttgtccaaatttgactttaccgactggggccaattgaaaccgtgctggcagaaaggcaaaactgcttgagattccttcctccacaatagaggagaggtttgcttgaaagggtttggcgagggaaaagctggaggaaccttggccggcagtaaaagtggggacccccgccccctgcctcgggggcgcctcggcccctgaatgaatgaaagaggaggctggatggagacagactcacaccacctgtcccttccaggtcctgcaaaggagcacacagggttcttgttggctcttccaccttgttagtcaccaagaaggagaaaacaccaacaggggaactgtaaagctgcagttttgtttaagccccatagtggaaaccggaaagagctccagctcggagaaaaatgcagctctttgcctttgcaaatccgtgtctttctctgggaggccagagccattgtgctcgatttctaagcagggtttcagagtgtctcaggaggggaaggcagagtctcagatttccggcatcccaggtcctaaccaggctttgaggagacgcttcctgtcccatacaaagtgtgaagtgtaatttgatttggagttagttaacaaattagatgagctgtgtgcattttaaaaattcagtccttgatcccccacccacacacatttgcacaatttggtcatttatattcagtgtttccatctttagaagagaacaggaagtccccagtgacatttatggagtgtttgtagtagcttgggtaggtcagtaggaacacaatgcagtgaaaagcagagttgagatgggaaaatatcctgttttcagagccccccagggatgacattccttatcgtctctgtccacccgctctggagtccactccgcaaacagcaacttgttctcacttgagagcttcctcctgccggagctcagggatggagagcagctggcctcagtcttctcctcttacctctttgtttctcagactcatcttccaccttgaataattgtttttaacctgctctccctcttctctagctgtagaacccagaactttgtgtgtgtggtcaaaagtttagagagtgctgcaggtaatgctgagataaccctattaaattctgtaagttctcatcacaccaagtttgtttgttttttttaattctcattttattttatttcattttatagggatggggtctcgctacgttgcccaggctggtcttgaactcctgggctcaaacgatcctcccgcctcggcctcccagagtgccaagttatttttttaactgggatccacgggcctagggattctttgatgaaccgttcaaaatacgtgtgtgtctgtctgtctgtcttcaatgtatacttttctagggagagtctttacttttcaccagaggtttgtggcacacacatgtcctgtactactgtatcagattgtgaattccttacatgttaaagactgcttcaaatctgtccggaagtctcggctaataaacatttaaataaatgaacttcaaattcccatgtgccaccactgttttcattctgactactctcaagcctgtagtgtcatctttttgttactgtgaagtagacactcaataaatacttgtcaaatgaatcaatgttatggtcctggtccactaggaccccaggatcatcgtctaccattattgtctatagtttctttaccatcttgttccagagcagttctttctctgaggtctgctcacctctgcacgtgtgtctagtttccagccctgtcgccttaccattctctttcctttacctgcatttcctgaactgttaatagttaacaatagcttctccctccacccactcactcatacctgaagtgagaagtcatcattgaggtctctgtggattttgtcagcccaacctggggcggcctcctggaggtggagttttcagatgagggatggacattttggtgtctgctgggtagatctacctgggagctttggcaggggccccagggcagctctgcctctttattttggctgtgggacccctggtgcactagggtttctcaagtaagcatctgtgtcctgggagagccataggcaggcctgagagggcccctggaatctgggacccccagcccggcccagtagctggtaccatcatctttcttgcaagggaagttatggaaactaagatgctaatgtgctttgataggcctggggtggctctaagccctgggaagagccctggcaactttccctggctggcgggtagaatcttctcctggcagttcagggctctgcctccagctccctgggggagagcaactgagggaggagctggaggccaaggcctcagtgctgagctgcctgcaccgcagctgcaccttctgggtcctggctgcaggaaccccatacttctccagcctttccatggttcccgaagacctggcctggggagggggtcagcagcctggggctcacctacctggcttcaaatcctggctctaccgcttactcgctttgcgaccctcataattgacaaaagccctctcggtctcggtttccttatctgtgaaatgggacaataacagtggctaccttataggattgtgtgatgatccatcagttataatagctcctgagcagcgtttagagtaacacctggggctcggtgcagtggcttatgtctataatcccagcactttgggaggccaaggtgggaggatcgcttgaggccaggagtttgaaaccagcctgaccaacattagtgagacccactctctaaaaaaaaaaattagagtaacgcctggcacagagagcccccagtaaacctcggctgctgtgatgagctttgtttcttcatttgttcattcattcaccagactttttgccggggcttgccgtgagccctacgctgctctgaagaaagccgggctggggtgagcgtgatggatgaggtgtctggcttcacaaaccctgtgtgggggggttgtggtgagaggaaaccgcacacatcattattcagttaccatcgtggggagactgtctggacgcagagagcaggctctgtgtgggagcggggagggcaagccctggttgcgaggcagggcttccccaggattcagcagggatctgaaggactttgcaggcacccagggagataggagaggaggagggagcagccctggccggacactgtcctcctagcattgcctgcatcagggactcactcagctttaagaagcccctttgtgggggacagggagcatctgttagtttataggacctgaagtgcccccatgggctcaagtttctgggaaggcctgcaggtggccgtagggctgccgcaggggtgctggccccagggtctggattcaggggagcctgcagagggagggcagctggaggctgctccagtgtgcattgttacgaggcaaagtaaggagactgctgggcccacgctgggccggggtggatggaggcaaggaagtcttcgccggggcaagggcaccagctgtagatgccggcagctttctcctggacacgggcctggaaggctgacagggtgtggtgagtgccaccggctcccctgccgtggcctggtcagtggcttcacaggcctccgtgggcaggaggaggatgaccttgcattctgcttggccaccattggcagtgacagacaaggtgtgtggggatgtggccatttcggtccgtgctctgagagccaggtgtgggttgggtttggggaagacaggggaatggcattgacttgaccctgagcactttgtcctggggtgcaggcccggctgtcactcccctggagctgggaatggcattgggcggtggctcagggtcccttgccccagcggcaccatctctgcatttggccagcaaggctgatgggacttgtgtggacatttctgggacgtagaccaggcagcatgacacacagggaggggtaggcagagaagggcggcccctgggtcttggtttccaagtcaggctttgcaagcctgctgtgtcaagccctctctcggcaccaggccaggtgggccagggtcagccctggggctgtgatgagtgtgagtgcccctaaagtgtgtcatgtccaatagctgcctcctctctgggcactgcctcccagccagatatcctacagcccccgtcccagccacagacagcaatctgattccctcatcctcggcaggtcctggggttggggtaagaatttgtcactaagtgcagatgttcccagagggtgctggctcagggctgcgtggattacagccctttcatccctgccttagacccacctgcaactctggagaaaagatggcccagtggacgcctgcggggaggagggagctggtccccaggatgagcagatttgggggcagtccccatcacgggaccggtgacctactgccaccagcgccagtgaatggcagaggggccctggcataaggcctgggttcagaatgggaacctgcagagaaactgtcaaggtctcccgccacctgacacctccgcctggctgccaccctagaaacacccttgctgcaagaagatgggggagtttgtctggggcatggtctggcgacaccaacttgagaacctcaggcctaagtgttggcctctgggcctcagctgtcctctgagctgtaaagctggctcctgggcacttgtggaaaacactggactctttattttattttactttacattctgggatacatgtgcagaacgtgcaggtttgttacataggaatacaagtgccatagtggtttgctgcacccattggactcttcaatccagctccactagaaatgactgccttctttcccttcttccgtccctccctcctcccctcccttttttccttccttccctgtttccttccccctccctccttcccttctttcccttcctctcccgtcctcatggggatataatttccatattacaccatccgccgattcagaaagcacagttgagtggcattttttcacaaccttctataagcatcacctctaattccagaacgttttcctcaccccaaaaggaaacgccatcctcggtacacagtcactccccctcccccagcccctggaaatcaccaatctgcgctttgtccctacagatgtacttattctgaacatatgactagaaccctaaaagatgtgactttttgtgcttggtttcttgcagttggaatgttttcagagttcatctgtgttggcgcacgctcgtgcctttttatggctgagaaatagtccgctgtgttgactcagcacgttgggtttctccacgcatctgttggcggatgtgttagttatttctggagccgggtgtgttgtgctactcacgggctgcactaggagctggggatatcactgagtaagccacagcctcgggcacccaggagctcgcagagcaggagctgggagggaggtcaggaggtgcatggcctgtttgccaggctggagagacttgcaaaaagtcactttgagccagaaaccagagcctgaggcctctgactcccagctgcggagccgggagggaagctctgcattttgctttgactgtggggtgacgtgtcagttactgtccaaatcagaacctttctgagagtcgacgtgggtactgctgataattagtctggatacccgaaagaatggaaagcagggacccagacagatccttgcacaaccgtgttcgtagcagggcgaggcctggaggtgcgatggggatctcaacggggcagctgccgtcttgctggagcccacggtctttggggggggtcacaggtgttaaccgcatatcatacaagcaggagtgtgaaatttcagggttgccaaattcagtgagggtcttgtgctggcctggccacttacagtggcatttcaggaaaaaaaatcactctatggacctcagtttccccattagtaaagagtaggttggactggaattctgtaccatccagtatagttgccatttatgaaatgtggctatttaaatttaaataaaaatagaaattccgttcctcagttggactagctcagtgtcaagtgctcagaagtcacttgtgaacacactgtggcaattcctcaaaaaacgaaaactagaaccaccgtagcatcccataattccacttctgggtgtggattcaaaagaatgcacagcatcttaaagagctagagatatttgtacacccacattcatagcggctctgttcacagtagccagcgggtagaaacaacccgaatgcccgcggtcaaatgaatggagaaatcaaaggcgggacaggccgggcgtggtggctcacgcctgtaatctcagcactttgggaggccgaggcgggtggatcatctgaggtcacaagttcaagaccagcctgaccagcatggagaaaccccgtctctactaaaacaaaattagccgggcatggtggcgggtgcctgtaatcccagctacttgagaggctgaggcaggagaattgcttgaacctggggaggcagaggtttcggtgagccgagatcgcgccattgcactccagcctgggcaacaagagcaaaactctgtctaaaaaaaaaaaaaaaaagggtggaacatacaaggaatttgactcagccgtaaagaggaagttaggatacctgcaacagcaagggtgaacctttcgggtattacgctaagtgaaataatttggtcacaaaaggacaatcctgtaggattccacttataccaggtccgtagagtagtcagattcagaaaaacagcagaatggaggttgccagaggcttgggggatggggctggggagttgtttaatgaggacagtttgttttacaagatgaaaaagttctggagatttgttacacaacaatgcgaatgtacttaacaccactggactgcacacttcaaaatagtgaccgtggcaaacgttatgacaattaaaaggaaaagtcacgtggccagtggctaccacgctgagcagcgcaggcctcggacggtgtcgtggtcacagacaatggagtgggtgatctttaccattgtttccagctgtctgagcaccatggtgtcctggggccaggatgaaagtgtctctgggtatgggggtctctgcttttcccacttgggagtcctgaaggcagaccccaaagctcacctggccaggtaggagagcgaggcgggctcttgcattgctctctgcgtgcgtgcctgcctgcgggccagccggggcctgcaaggccgcctctcgagggaggggttgcaggaatggctctcacctgtgcagaaggcaagccactgccctacgtcaatggcaaagatggggctcggctgcgttgtattattatttctcaagcggggcccctggtgggcaggatgtttggtttgatttgagtttctgcagtgagtgctggtgcctgtggagggacccagctgcagctgagccggcccctccctcgctctgggctccaggggcgttgggggcgagaaaggagagttcagggggcagcgcctccccccaggtcctgctggggagggttgagggatgctggggggaggtgggggcgggtaggggctggtcccagtcccaggcaaaatggctctcagacccacaggcagatggaagcgattttcggtcacgtgggtggggactgaactgctgccccgcaaggcaaggccccatgtctggcttcaggaagcggccccaaagccacatggtccatggccagatgcagggctgtgtctttgtttatttaaaggtcctggaagcccaggggagagtatttctgaagggggagcaggagcaggagcaaagccctgaaggcttccaggctgcgtggcctgggtgggggccacgtgggggcacagagagaggagccctggcctccaggtccgcctgtgggtattgctctcagcagtggagatgtgtggacccccccttggcatttcccaacaaggaattatattgttcctttgttcccccaattccataagataggaattcctgtgccctgtggaggctgagaagacggggaggtgcctgtgaggataaaccagcccccagtttctggcttccagagtcttttcctctctcacctctgatgcctcaggcctggggagcctccctccgacaccctctgaccgctccagtgaaataggccgagagggatggcttgaatcggctggggatgcaggctgcagccagggggctcagtgggcatttcctgagttcggttcttgccccgcaagtggaagggcagttgaactgaagtctcccactgcccctcctggcctggaagcctgcctcccaccttctgggcagagtgaggagtgggcgtgggccgggagggctgcctcctgtctgggagggctgctcacttgcctgtcacgggggatgagccccctgcagcctcccgtgctgtggccctggctcccacgccggctccactcccctgtggctgcccctgctgggtgcccaccggtcccagggaaaagccactcccctcccggaggactggcgggaggggccctgcctgggagcgtgccgtgtggtccctgtcttagcgcaggatgcctgaggccagatcctccctgggaggcaggatggggcaaaagtctccccgcaggcagagcagggcctggatgggcccaagcagggacgggggcacagaacagcagccgcccagcctgcgtgggagctgagggccaccaagggcagctccagcctgtggggactagcagaggcaccacctctgtgaccagcgagttgtctgcacctgcatgcgcatgcaccagtgagtgtggcgagtctgaggtgtgctgggacctggcccgtgtaccagccagccctgatgggaaccagccccatcctgggtacccctggaaccccactgtgtgggagcacctgggtcctcagcaggcgtcttccgggcgtccgcccccagccccaggcctctgacccgtgtgtggtgtcttaacagcagccaggagcagggccatcgaagggacctacagacagaagaggctttagtgatttcgggaagttcagctccacgtgccccacatacccaagagtaaaacttggtcttggcctgtgggtgtgcagcccgtgggcgctggccaggcacacaagacggccgcctgggtcagtccagggggaggcagatgtggtgcaggggcccccctcctccatgagcccaggaacagctctgcatccaggcacccgccctgcacccagcacttttccttctcccaggactgctggctcgttctatgggattgaacacacaactccatggggaccgacgctggttctatccccctttcttacaagaccatccatggggatgtgggaggcggggacacacgctggttctatccccgtttcttacaagaccatccctcctgtgtcttggctcgtggatcggcttctaaggcctttgagtggcagcaggcggtacagcttatctgagtagaggtgaaggagagggccaggtccacctgggtggcccgaggcagtgtggagggccaggagaggagagcaccctccacccttgtctgagcagccctccagggtacggagacaggagttcagggtcagccctgccttggagcgcagggggcccccagcttggcacagctcctagaagaggagatgaaaaagcctggccttgggagtctggggatggagctttgctggggaggcagcgtggctgcaggatggcagctttttagaggacaccacggccagggacatccacccgggggaattctcaggggtcgcctgggcaagtcgcttagcctttctgagcctcagtgcctcagtttccccatccaaggatgggtgtgacaaccacctggcaggcgcctgtgtgtgagcccctgttccgctctaactcctctgctgttccttccccagccactgaggcggctcccagctgcgttggcgacatggccgacacccccagagatgccgggctcaagcaggcgcctgcatcacggaacgagaaggccccggtggacttcggctacgtggggattgactccatcctggagcagatgcgccggaaggccatgaagcagggcttcgagttcaacatcatggtggtcggtgagtcctcaccttgcatgccactcaaccaatgccggaaaccagcctcagcccccagggcggcccacaagcctttgggcttggtcttcccttctgtaaaatggggcagcaaccctgacctcaaggacggattgccagtgacattgcgtgtgcatgcatgcgcctgggaggagcccacagcctccagcggctcctcagaggggcctgtcctgcacatccagggcccctgagatgactttggggagcccaggccggcctggagcaggtcctgatgagtggtcgctgcctctgagcaatgacgtcagcttgtgcagagggttctgtggcagctgtcccctcactgttgctccagcctggccctccaggctccccaccgcaccccaccgcaccccggccagaggcttcccagcagctcagcttcagctctgccctggaattggggcctcgtggcttccacaccccctggtggccccggagagctggaggtcaccacgggaggtcgtcgatcagcacgacctgggcagggtgagggggccaggctggagtctacagtgggccgcctgttgtttccaaagccccccaggtcccattcaaacctcacagggaccctgtgaagggggcgtcccgttttccaggcagaagcgaggctcagggaaggctgccaaggttccttagctcacagggcagagaaccgcagccaccgttttgactcccagaactgtgttctgcccactccacggggtccagggaggggtctggggaagtgcccccgccaggtcacaccctaaacaaaggtgagcttgcggggtttctgcaaggtgtctgggcacctctcaggccgggcctgtttctctgacctttgccagccgtgcacgtccttcctgcccagctctgtggacgcaaacccacacctgccagcccgacacctttctttcctcttctgcactgatctgggccctggctcccctggggtcttggtgtcctctctgcttcctgtagcctcatgggacccggctgctcatggccctgctgtgctcacagctgcctggaagctggcagcctgcttcaagggagggcggaggtgtggggtcccctcctacggcccccaccctgttctgcctgttgtgggggacgtgcttgtaccctgaggattcagggctgcctcccgggaagatggctggagagaaagagaggggagaggcccaaaggcagtggccaggctgggactcatctctgtgggctacggaggggctgccctgctccctagccagggacagggtgagaaggacctgggaacctctgcgtcccagccatggcacaggccttcttccggagctttggccccaaggagagggagaggcagcccagcagccctcgccttccgtggctgccactgtgacagccttgccctctgggaatggtgcgcaggaggccacttcacctgtctgggcctcttcgccctttcaaccctgagaagaacagtggtcctgattccccacaaaatcactccctcccagggatgccgagtgaggaacaagacgtggggcagctctgctctcctccctcctccctcccatggcagctgtgcccacctgcagaggtgcaggcaaggtggaggggcacctgtttggaggtccacagaccccggggagaatcccagctttgtcctaactcagcggggtgaggcttgtgtgtcttcccctgggctcctcctctgtgagccttagcttcctcgtccataaaatgggatcatcccataaagtgagatcaagcgagctaggccccgggcagggtccccaacaggttgtggttgttcgagaatttgcagcagtggtgatggtggttgtggtgatgaggatgatgggggtggtaatgacggtgatgatgatggggtgatggtgctagtggagatgatggggatgatggtgatggtggtggtgatagtggtgggatggtagtggtgatgtgggtgatggtgattgtgatggtggtggtggtggtgatggaggtgatggtgatagtgatcatgagggtgatggggatggtggtggtggtgatggtgacagtggtgggatggtagtgatgatgtgggtgatggtgatggtggtgatggtggtggtggtgattgtggtggtggtggtgatgatggtggtgatgatggtgattgtggtgatggtgatggtggtaattgtgatggtggtggtggtgatggtggtgatgatggtgattgtggtgatggtggttatgatggtggtaattgtgatggtggtggtgatggtggtgatggggatgatgatggtgattgtgatgggggtggtggtggtgattgtgatggtggtgatgtgggtggtggtggtgattgtgatggtggtgatgtgggtggtggtggtgattgtgatggtggtggtggtggttgtgatggtggtgatgtgggtggtggtggtgattgtgatggtggtgatgtgggtggtggtggtgattgtgatggtggtggcgatggtggttgtgatggtggtgatgtgggtggtggtgattgtgatggttgtgattgtgatggtggtggtggtgatggtgatgatggtggtgattgtgatggtggtgatgggagtgatgctggtgattgtggtggtgaagggggtgatggtggtgattgtgatggtggtgaagggggtgatggtggtgattgtgatggtggtgaagggggtgatggtggtgattgtggtggtggtaatggtgatggtggtaaaggggtgatggtggtgattgtggtgatgtgggtggtggtggtgatgtgggtggtggtggtgattgtgatgggggtgatgatggtaatgtgggtgatggtgattgtggtggtggtggtgatggtgatgattgtgatggtggtgaagggggtgatggtggtgattgtgatggtggtgattgtgatggtgatgtgggtgatggtggtgttgatgggggtgatgatgttagtagtggtggtgatagtgatggggatgatggtggtgttgatggtgatagtggtgggatggtagtggtgatgtggttgatgatggtgctggtgctgatgattgtgatgacagtggtggtggtgatgagggtgacggaagtggtgatgatggcgggagtgatgggatgatggtaatagcagtgatggtattgtgatgatggtgctgatggggatggtggtgatgataagggtgatgatgatggtgatgataataataaaagtaacaataataaagggatacaccttgcagtatcccagttggcatctcctagatctaaggtgtcgtggctggaacattgacataactcctgacctgaggttggccaggacacagacctggtggacagagagagatggacgaggagtgtccgtccttgggctactaaacagttcaggccagggattcccagcaccagcctctgtcctcccaggagcccacacttttcctagaaaggtgttatcaaagtcagaacatcagtgtaatttagggtgttttttgtgttgtgtttttttgagacagggtctcattgttgcccaggctggagtgcagtggcatggtcttgactcactgcagcctccacatcctgggttcaagtgattctcgtgcctcaggcatgtgccaccatacctggctaatttttgtgttttttggtagagacagggtttcaccatgttggccaagctggtctcgaactcctgacctcaagtaatccaccctcctcagcctcccaaagtgctgggattacaggcgtgagccatctcgcctggccgatttttgtttttttaaaagacagggtctctgtcactctggagtggcaatgatcctagctcactgcagcctcgcactcctgggcttgagcaattctcctacttcagcctcctgcgtagctgggactataggtgctcgccactacacctagccaatgtttacattttgatgtagagacagggtctctctgtgttgcccaggctggtcttgaactcctgggctcaagcaatcctcctgcctcagcctcccaaagtgctgggactacaggcatgagccaccacacctggcctagggtattttttttggtgtgttgctagcgtagcccaaggcagctctgtgcagggtaaagcaatggggctccgagtctggaggggtgtgtgtgtgtgtgtgtgtgtgtgtgtgtgtgtgcgcgcacgcgcgcgcgtgttatatgtgatttgtttgtgtgtgttgtgagagttgtgtgtgaggtatgtgtaagaggtatgtttgaggtgagttgtgtgtgtgttgtgagttgtgcatgtgaagtgtgtgtgttgtgaggtgtgtgtatgaggtgtatgtgagttgtgtgtgttgtgttgcatatgaatgctacttcctcatcctcgtttgtctcagtcacctgtggactggctgtctgcacacacggtcactgtccctcgagtggcaccaccctgcaggccagcgccccctagcacatggccccacagaccccatgggacatgcgtgagcctgcctgatgctcacaccagctccacgggggaaggactgtttatcccattttgcagatcaggaaactgagacacggtgaggtcaggtgacttgcccaggccctggccggtcagggaggagcagtttgaacacctgggctttggttgcaaccaccctggtgaactgcaggaatcccggccacctggtgcaccctgggcagccctgggctcctccgccagcccggcctctgtcctgtccaaaatctgagccaccaggagacctcctgtccagaaagcacaaggggcacaagagatgccgactctcccaggcccggctcacctctcaggagaggactgtggcctgggttgtgctggcatcagagcccggctgtgtgggtttacacagtcactggacacccggctcgagggtgaagtcctcgggggctgcttggcagggatattgccgggaggtagcccaggcactgctgaatctcagactggagagcctcgtgcctgggtgggaggggccccatgtgcagaccctgctggtctctccggagagacccctgaccggcctcccatcctctccccagggcagagcggcttgggtaaatccaccttaatcaacaccctcttcaaatccaaaatcagccggaagtcggtgcagcccacctcagaggagcgcatccccaagaccatcgagatcaagtccatcacgcacggtcagtggccgggagtgggctgggggtgcaggacgcccctgccttcctggagcacaggggttgggggtcaagaccatcacacacagtcagtggccaggggcgggctgggggtgcaggactcctctgccttcctggagcacagagtggggggtcaagaccatcacacacagtcagtggccgggagtgggctggggatgcaggacgcccctgccttcctggagcacaggggttgggggtcaagaccatcacacacggtcagtggctggggatgggctggggatgtgggatacccatgccttcctggagcactggtgcggtgtgagggtgcccgagtcaggcaatcccaggtccccaagacggggactcgctgtgcccaccatccccagcatgttgagcatgttggggctctggctgtgatgggtcagtgtcccggacccctgtgggccccgtcacactgagctccccacagacaactgagttttccaccaaaagtctgacaggcaaggggctcccaggggaaccgtcaccggcctgtgccggagttggctgaggaaggccattaatttcccggtgtctccttggttgtcatcgctgcctacctggggttgccccggggtcagtcaggtgtggggtgtctgtgagggtcttccgtctcccctctgactctgcgtccgtggctctgtgcagatattgaggagaaaggcgtccggatgaagctgacagtgattgacacaccagggttcggggaccacatcaacaacgagaactggtgaggcccctccagggggaggagcactagcgggggcttcagggctccctggaccccacccagagtcagccctagaggtttcccggcccgcgggggtgcagggcccacctcctgggacctgacatgctgccaaagccgcacgtctcaggggcctgaaaattctggaccaaagcagaattacctggggaatcttgctgtccccaactcatcacctgaggccagcccggggaggctggtttgggaggccgagggtaaggctgtggcatctccgctcagcaagccagacctcccagggcatgcatttcattggaaggtggggtgttgggctctgagtcctgggaatgcacgacctgcttggggagggcatctcatgtgcctgctgactcgtccccatcccccacgcagctggcagcccatcatgaagttcatcaatgaccagtacgagaaatacctgcaggaggaggtcaacatcaaccgcaagaagcgcatcccggacacccgcgtccactgctgcctctacttcatccccgccaccggccactcgtacgtccctgcagtgtcggcgtcctcatgccgggtgccctgggttccctctgtcccctgggactgcaagacggtgctgtctgccctgctgctgggtgcagaggggctgagtcaggggccatggccgccagctatgaagttgggggtgtgccatgtctgcacctccaaagcctcacactgacccctatgcaagtgtcctgcccagcccccatccttcagctgcgtcttggggagctgagggtcaggcaggccctgggctgttctggagcctggtggtctgtgtcctgccttctcaggccaggctctggcaggtggagtgggagcccccagccaagcacccgtagcggtgactgaccttctcatccgggccctgcctcatgggaccccttagagggtttggtgcgttcttagacgggaagcacagagatcagtgctggccccttccagggctggacggggctgctgttggtgttggtgagagccctttcctcccgccggctctgtccgcacctgacgtcgcccctagagatcagcaagggcgggaggctgcatgtaccctggcaggtggactcttcatggcctcacggaccctctgtcctcagctccctgtgcaccccctgccagacacctgtggctcaccctgagccagggctgggaggaggaggaccagaggccagcaggagtggctggtggaggcagccgtgggtggcttgtctgcatgggtgggtggagaaggtccttcgcacctgctgtcccagatgtacttccctgggcggaggaagcccaggggtttggggaaaccatactctgtgggcaccaggtgcaggaaggagcctggctggtgggcagcgggcctcacccagagtctgtgggaaaacccaagccggagttttcgagcccaccctctggcatcatcctctgtgggccagcaggagtcaggggcagggggccagcccgctgtccatgggcctctcctgaactgaacatctgccctcccaggcagaacggctcacctgcggtcctgtggcagctgttccagctgctccaagctttgcctcagctgaggctgatggcaggaggcagaagcctctcctgatgccagctgggcaagccgagggcgggcgggcggtctgtggcacttctgccactccccagcactgaccctttggctgggactccagctaggcatgttgcctggtcccgcccaaggcgtccagtcccatggggcaggggcgggccttggccatctctgcttaaacttctgcccggagcgggcttctccccagccatgtgtgtgaccgatttattctcactgtgggaaaagctcggctccagaactggggaagatggtgccccagttccagggccctgccagcccctgccacccacagctttccccacatcagaccccaggctcactggggccaagcaggcaaggggagcagcccgcctggtgcaggggagcagcccgcctggtgcaggggcaccgcacactggtgctagcttctatttctcttgcctctcccctcccagccaaagccccacagcaagacggctgctgagccaacgacagcccttctgtgtggacatgtaggggtgtggttgggaccccagaactcatggacgagggtgcttggagctggccctggcccgcctggcctgtgcagtggtgtcacctgtgtctgggacacacccgtgtccttcctctgccccacactcacagcgtggccgactcggcccggggccctgtccttgccagcagggacccccgtgagccccgagccagcacctgagagtgtcgacacctgcttgggggtgggtgcccccccactgccccgctcccccagatgagcctcacgcacatccctctgcttcagcctcaggcccctggacatcgagtttatgaaacgcctgagcaaggtggtcaacatcgtccctgtcatcgccaaggcggacacactcaccctggaggagagggtccacttcaaacagcgggtagggttccatctctacttgccccagcccttctgtgcaacctggagacgctgcaggcctggcaggggccaccccgtctaaaggagtcacactgtcagggagaccgaaccgctggtcactctccccagcgggtggctggcctggtggtccctggcccaggtggctgctgggggccgtccctgagatggcctctccagctcccccatatctcaaaagcagctttgtgggagtgccaattctccagcagagtctctgaggggggttttggagaagacctggaccaggcagatggtgaatctctcttccagggagtgaggccgagcaggggccgtgcgacatggcccaccttgttttatgccccccctttttttttttgagaaagggtctggctcagttgccaaggttgcaatgtagtggcacaatcatggctcactgcagcctccacctcccaggctcagtccccgagtagctggaattacagacgcacaccaccatgtctggctaatttttgtatttttagtagagacgaggttttgccatgttgcccaggctggtctctaacccttgggctcaagggatcctcctgcctcagcctcccaaagtgctggggttacaggcatgagccacctcacctcgccctgcctggtttttattagatggaagagaagctgggccaggtgtggtggctcacgcctgtaatcccagcactttgggaggccgaggcgggcagatcacttgaggtcaggagtttgaggccaacatgatgaaaccccatctctactaaaaatacaaaaatattagtcgggcatggtggcgggcgcctgtagtcccagctacttgggaggctgaggcaggagaatctcttgaacccgggaggcggaggcttcagtgagccgagattgagccactgcactccagcctgggtgacagagcgagactccatctcaaaaaaaaaaaaaaaaaaaaaagtttcaggagggatggtctctgccaccttcttctccgccaccgtctgaggcccctgctgtgggatagggaggggcatccaagcaagagggcagccctgggctcttcctcctgacagggcagcacatcagagccacatggggtgcctttcaaaatgaaaccgaggtgcctgggctgcggcaccacatctgcctcggtgggtgtgggtggggcctgtaacctactccgtcctggggccaggtgtcagggaccttcccagcatgtgcaggggaagacagtccacacaaagtgggtgtgtctgccggaggctacacacgggctgtggtctgtgcctgggcaggcgagcagccgctcactgggatgtttctgttgcacgtacccatgtcgggctgctggcagggagctgagaggttactgcaggcggggcccctgctggaactggggactgtgacgagggttttttaggaagggtttcaggaggggaggtctcggtaaccctgagtactttcttggggctgtgatgagcaggagaagagaggtgggaggtgctcaggacgatgaccttaagcccctggggagttgcagcgtcgctcaggacagcaggtgcacctgcagctgcccctcttccctccaggaggcacaggagttggaggtgattggtgtcacagccccccagagcctgcccttgaacccgagcctggggcagcacacagtgtggaggtcatgtggcaaacaccagtgggtgggtagagcttgccacagggatgggcccatctctctccctccttatcccagatcaccgcagacctgctgtccaacggcatcgacgtgtacccccagaaggaatttgatgaggactcggaggaccggctggtgaacgagaagttccgggtgagtggatccactaggatgttgttcccaggggacccccagttcctgctgaagggtgggttgggggtttggaggaccttaagccatgaaattatattcttggggccagagggcactgagcccaggtgtctgtacccagtgctgtcaggctgaggctctcgtttttgggggaccccaggctcagggcagctcctcccgggggcccaggggagggaattgccttcccgcacatgtgtaaccaataccgtctgcccgttccccaggagatgatcccatttgctgtggtgggcagtgaccacgagtaccaggtcaacggcaagaggatccttgggaggaagaccaagtggggtaccatcgaaggtactcgccgcaggcgccggggctccagacagatgggaagacagtctcttctgctgacccagagcctgtgggccacgcctgagccagggactcgtggaacctcatccactgccttgccccacccagagggaggggtctccttgtccccattcaacccttgggaaagtgagagggcaagtggcctgtgcagatgcctccaccccagacctccccccgggcagggaaagattcagggagacaggagctgggatgggggccgccaagttctggatcctggtgcaggctctttcataggcacctgtgtggccctggacaaatcgcccaacctctctgggcctagaaaaggggtgggctgtagctctgtgagccagatggaccctcggccccttaccctgctgaagttcctgggaccctcacaccttagtctcttgagtggctgttgtaaccaattagcacaaacgaggggacttaaaacaacacaaacgtattttcacagttccagaggccagaggtccgaaatcaggggctgtttccttctgaggccctgaggaccagcctcatccatgccttcctccttctggtggcgcctggcattcctagttgtattgtaaaggcatcacatgctctaatctctgccccattgtcacagggccttcttccctgtgtctctgtcccgtccctcctcttcctttttttttttttttttttttgtttgagacggagtctcgttctgtcacccaggctggagtgcagtgttgcaatctcagctcactgcaacctctgcctcctgggttcaagtaattctcctgcctcagcctcccgagtatctgggattacagtcacgtaccacccacctgacttaatttttgtatttttagtagagacaggatttcgccatgttggccaggctggtcttaaactcctgacctcaggtgatctgcccaccttgcttggcctcccaaagtgctgggattacaggaatgagccaccgagcctgccctctttccttcttgtctttggacaaggatgcctgtctttggacttagggcctaccctaagtggatgatcccatttggagatccttaatgaatctataaagaaagacgttttccaagtaaggtcacaatcatgggttccaaggcctggaccttgaccatgtctttgaatggatgggagcccctggggggccacagttcaacccactcctggcggtgacaccccgggagggatgggcccgaacgtttccttccccttcctctctctgtcccttcatttctcattagaatggaagaggggaaggtgcagagggaaatgcagcaggaaaagccactttgttctgggagagcacttggctgaaaggcccagtagagcaggaagcacaagtctcttaatcttccagggcctcagttttcatcatccacaaagtgggtgcagtgtgccaagattttagtgagttgagagactgtcccaaagaccacagagctttttgggaagctgttgctctaaaaaaatggtcataatgacaattaccaggaggcatcagacactcctgtgccactggctagacatgggttatctcgtttcatgtccgaagctccccgcacccaccctccttgcagagttgaagaggtgctgtgagcagaaaacctgccaagggacccagaacgggaggcggctctagaatctacagctccagccctgcaccagactccctcgagatgggagttcatgcctggaggagggtgtggagaggcacacgggcctttcccctgtctgcactcctcccctaccaccacccctgccgggcccaccctgcgggagctgcccagctgggtgcagcctgggtgttttccagtatccgcctgtggtgtcaggctggcttgcctccccttggcccctctgcctgcagttcctctcttcctctctgcccaaagagttcttgctgtttaggaaactttttatgaaaggcaggtttgggagagttagggatggatgggcctgggacgggccggcggctttgctatgggcgtgcctctgctgcaccctggtggccaaccttgagtaccgcaggtggccggtgacagaaactgtcaggaaatgcacaagagagaggtccccgcacctctctgacctgtgcgttgttgagcaccactggctccagctgaggaagagtctggaacctgtcaggacagttgtgaggtggtggggcccactttccagcagtcttatatgaggaccctggaaatgtgccttcagcactgctgggtttttatatcaggggccccatgagttcatagctgacctgacacccggactagtaagggctgtgccttgttcttgcctcccacttggtgaacagcatcttgaggtatctttcccatccttagaaaccaccccaagtattgtcaatagaaatgtggggtgtaattgatcacgccatgaactcatttaatcctcatgtccctgagaggcgggtgacgttattatccacattttatggatgaggaaactgagggaatgagagtaacttgcccgagccagggagtggcgatcacacactccaactccagcctgagagccccattcttcctgccggctctcgctgcccgtcagtgttagatgagagtgctgctggtcagtctgcaggaggttctagtgtggacaccgccctacacagggccgtggcaggagggcctaggcaaaggcaaccggcatagcactgagagcacttgagggctgggcaaggtggaggccccggccctgcctgctggcctaccaagtaaaaactagacatttttaacttggggaaaagccatgtggctctgcgatggggcagcctggagccaggtgtatgggttctgcatcccgctccagccttatgcactgtggagctgagacagacacagttcttgcgttctctatgcctcattttcttttcttttctttttctttttctttttttttttttttgagacgaagtttcactcttttgcccaggctggagtgccgtggcgtgatcttggctcaccacaacctccacctcctgggttccagtgattctcctgcctcagcctcctgagtagctgggattacaggcgcctggtaccaggcctggctaatttttgtatttttaacagagacgagatttcatcatgttggccaggctggtctcgaactcctgacctcgtgatccacccacctcagcctcccaaagtgctgggattgcagacgtgagccgtggtgcccagcgtctacgccccattttcgtaagataatggggataacaaaggaatcacaagagacacttgcaggtgtgtgaagacgaagttcatcacatgggagggcaccgggtgtctttatttgccttccctgcccggctccccacctccagtgatgccgttcactgccctccttgttaaaaggccttctgttatataacagttacacatgccaggcaccgcgtgttcatataggagttacgaagcacagcaataaaatgaccactctgagatggccaccagctcgagcccgagggcacttgtgggtgcccgtggtctcctgcccagtctccctgagaagtggccactgtcccgagcttgggcttgtatgtattgtgtgaagtgcacatgtccctgagcaatgtttagcattgctgattcttgagcttgtgaatggtcgtccacagtacgtagcccctgtgtgtgtccctgtgtgtgtgtgctctgagcgcacacaaggtggatggggccgtgggggtaacaccctgtgggccacaggttttctttaaaatcccagctccgattcctgcttcatcccattcccagcagcccagccccctgcctgtcttcaggcccctgctgggacgtcctgctctccctggtcaccccagtggtgcgggggcccactgccctggcttctccactgtggcttccttccatgctcctatttggcctggtcactgtgccatctcccattagccaggaactttctggagagcaggagctgagctgtccaggagcaggagctggtgctggtcactccagtatcccccagactgagggcagtgccaggtgtcctatactcagctgcagagcaggtggttcccctgccctcctgcccatggggctgccctcagactctgcttttggcaccagcatttctgggcagggggagagaggtggggtccgggcagagtttctccactgggacattaaagcccctcctgtctcctctcctagttgaaaacaccacacactgtgagtttgcctacctgcgggaccttctcatcaggtgagagacagggtgcttgggtggggctgacggcttcacccctaagagggccctacagcgggtgggggcagtgggtgtggggccgaagccctgggcagagtgggtgccccctgccacctgcctgccctgccctcgggaagatcttggaagcccatcttctgaaaaagaaaacccactgggaaatgaagcaggcagtgaagatccttttcaacccctgcgaagttggctggatgggaaggctgagctttgatccactgtggtctggcccgttagagctgcccggtggccactaagggcccagtgaggcctcatgtgcaggccctgccggcagcgtggggcgtctccagctccgatcccactggcctctgacccctacccctttcacctggctgaggcttctccttgtttcccttgagtccaggcaaggaggggaagccctgatggagagggtgctgggtgggtggtccctggagtgtgggccctggcctgggcaggttcttcctcagcaagcagctggcatggatgatgggaatgttatcaagaggaggggcctccaggttggcgggggcaggggtggggggattccgggagccgttctgccattgtggggatactgggctttccaacctccctccagattattcctcctgagctgcagaggaatgaaaatccgagcccaggacttttttttcctggggacaagggcaacccagccctttgccccaggccacctgcctgccacaggccatagtcctggaggccggtggtcacccactgcttccaccctgccagcaccctggacaccggcctggagcaacaatgctccagccctgtccctctgagtctatgcactgtccctgggccctggacccagggccatagggtggacccagagggagacacatgcactggaatatgtgtgttctgaccgagtctgggcttaccagggggactgacccttcccccaaaacgtgtaccagatctggtccaacatggtgggcctgggggaccccatggggagccaagcagtcgggatggggagtgggggtgggggcaggcgggcctgagtccgaggcaggccgagcagggcccctgccccgctgcccccaccccgctgcgcccacctcactgacccgcccgccccccacccccacaggacgcacatgcagaacatcaaggacatcaccagcagcatccacttcgaggcgtaccgtgtgaagcgcctcaacgagggcagcagcgccatggccaacggcatggaggagaaggagccagaagccccggagatgtagacgccaccctgcccacccccgggatcctgcccccaagtcatttccgtccccccccaggccctcccaccaccccattttattttatatgattttctccatttgtcatcgttccccaccccttcgacatgctgccaggaaacaagggaaggggcctccctccgagtgagtcagtgatgaggccgcggcctccccgaggttgtggggaggctgcactggagccacaggcaggggtgagagcacccactgaattgacatgaccctctgtccccaggcctggctccccgagggctcagaagagcagcttcggtgtgcagatcatccgtctgtgtggggttctcagtgccggaggccttggggtgggggccaggcctcgcacttgcagaggagcccagtgggctgcacgctcccctccatccccatcggccctgtcccctggagtgtgtcagagcccaggggagaatgcagcccaccaggagcacctggaccccctgcccgccacatggtgtggccatcactcagcccctacccctgccctgctcctaagggtagaaaactccagggtcccctgccaccgactgcccagccactccaagccccctggcagctgcccctcctggagcagaaagtgcctttatctcagccatccgcagactgcttggccagatgcggggacaggctggaatgagggaggcgtcttcatctccctgccatccccctctcacgccacccccgcccccaccgggctgcaggtgctgctgatgcgctgggatctgattgaggataaaaaggaaggagagatgacccctaccccctcatcccccagttttgaaaaggtctaagcaagtgagtctggtggaggagctgagggagggagccatggaaggtgccagaaggaaggttggcgggggcacgtgtgggccgtggcttgggctggtcagagtggcgtgagctgcccggcgcctgccctgcccaagtgaccagggaagtgtgtgtgtgtccatgtgtatgcgtgtccgtctgtctgtctagtgtctgggtttggcccaagactgggctgtagttacattaatgcccagccagccacccctgccactcacccttcctggcccaggccttgctgactctctgagctggggaggtgggaggccaggcgagcctgactctgttgatctacccgtgcctgggcccctcccctcagagcccatggtaacgaacccctagaaaggagagaacgggcgtcaggggtgcacagtccacagctgaagagcaaggtttcgtggcagcacggcccggcccctcaccctctgtccccacgaggggacccatgggggctgtctttgcagggcacagatgaccaaagtcccttcctgcttcctgttacctgtcttgctcctggggagaaagaggggcctgatgagactccactcaggtgcacacatcaccaggtgcatctgcaggcaccgggctggctgcttgcagccaggagaaggtcagcgagaaggagtgtatgagtgtgagtgtgtgtgcatggaagttggggcactgggcgtctgactccctccccacccaagagaggaaggacccctcaccacccccactggtgagacagtttactttgccaacttgccatgtttttgccaaaaccaagattttgaaggaaatgagtggccagcgccagggcccaggccatgtggcctgcccagcctcaatgtcacttggtggcggggtggggtgggggtgggcagcagcatcccagccttgagatgcttcactttccttctctgtaaccagactttgaaaaattgttcgtttcatcaggctctgttcctcaatggccttttgctacgtgcctcccgagaaatttgtctttttgtataaatgacaaagtgttgaaaatgtatttcctgaaataaatgtttcaaatgcagaaaccca

SEQ ID NO: 13 - DNA, 1405 bp, Homo Sapiens
cgttacccgagttgtaaagggcggctccctgtgtctgccccgctgcaccgatacaccgagctgcgcacggtgcccagcgcagggagaacaaatgatcatctgtccaacgcgcccatttacaggtgaggaaactaaggctccaactcaatcgacgcactctgcccttttgattaccagaaaagtagcaggacaggtgtcctgtcccgccctaccccggcccactaagccggcaccccggctccgacccccggctgtgcccggcgccgccgcggtgcccggcgccgccgcctcgcccggcggggccgcccggagcgcccgcacctccgcccgcttccacctggccgggcccgccccgcccggactcgggactgggaagtgcggcgactcccggaaccagccattggcgccagcgcggggagctgggggtgcagagctgcgggcgcggcgggccacgcaggcggcccccacccccggcctggcctggtctggtctggtctgcgctgccgcgcgggggcgccccctcccaggcccggcgcccgccagccccgctccgccaggtgcagcgcagcgcaggggtgggcgggggtggggctcggcgcgcacgttcacggggcggggagggggcgggtcaggggcgggaccacagccggctgggccggggttctatgcgcatctccggggaggggcggggcgggggcggggccggggcggggcccggtcggtgcactccagacggcgggccgccccctcttcccgccttcctactaccggcccaggattagcgccctgggagcgcgcgccccgctgcctcgccgccacactttcctgggagcggcggccacggaggcaccatgaagaagtcttactcaggtgggcttcgcgcccggggtggggaggggtcggtgtcccgggaccagcgctgctcacctgagtgcctgcggccgggagtggcgaggcgcccccggagctgagcgagtccccgcggcgggcacactgcaggtcgagttcctcccaggacagggccgctgtcgggccgctttcgacctgagccgaccgtcccctgcgctgtctccagcccttgctcgagtgtcggaggggctgccctgggggacgctccctcttcctcgccccttgcaccctcgcaggaatcgctgactttccaggtcggccgggtgctttgggtccctgtgcgtctgtgtgggtgaatggggtcggggctaggtggaggggtgtccttgggttcagcctctagggctggtggtccaggccgcagcatcctttcttcggattctcttcggtttctcctctacttagtggggcacgggacggcctccagatgggaccgtccagcagcgcccaaacttggcgactcgggttcacgttttgcgctcaggacgccgcccgc

SEQ ID NO: 14 - DNA, 1818 bp, Homo Sapiens
cgtcgttcgtttttggtttttttgatagtcgtgttttattttcgttttgtgttttttttttcggatagtgttttttttagggtttatttaggagggtgtagcggtggttttcggggcggtggtcgtggtgggggtgttagttgtaggggtgttttcggtgggtgggagttggtggtttttcgttggtgttatgggattcgtatgttcgttttgcgtttttcggtttttgagtttataggtcgggattttgtttgttagtcgcgtgcgttgtcgtttaatttttgtaggcgtagagcgcgcggcggcggtgatagagaattttgtttggttgtttaaatatagttttttgtagaaggattttgcgttcggggaaggggaggaatttttttttttttgggcgttcgtttttttcgttatggttcggtttttatattcgtttatatttggtcgtagcggggcgttcggggggaggggttgaggtcgcgtttttcgtcgttttttgggcgcgggttaggcggggaggaggggggcgtttcggtcgtgtgtttaggattgttttttagcggttattcgggttttagttttttaggtttggttttgataggcgggcggagtagttagtgcgagatagggaggtcggtgcgggtgcgggaatttgattcgttcgggaggcgggggcggggcgggggcgtagcgcgcggggaggggtcggcgttcgttttttttttttatttatttagttgagttagggggtttaggggttttttcggcggttagttttgtattgtaggagcgcgggcgcggcgttttagttagcgcgtagggttcgggtttcgtcgggggcgttttttcgtcgttgtttttcgcgcgattcgttgtttattagttattatgtcggatttcgcggttaacgcgtagttggatgggattatttcggatttcgaaggtgggtgttgggttggttgttgcggtcgcggacgtgttggagaggattttgcgggtgggtttggcgcgggacgggggtgcgttgaggggagacgggagtgcgttgaggggagacgggatttttaatttaggcgttttttcgttgagagcgtcgcgcgttttcggtttcgtgttcgcgtcgtttacgtgggggattttgttaggggtattcgcgtagattttgcgcgtttttataggattttgtgttcgttttgcgtattgtcgtttgggtttttttttttttattgttgtttgtgtttgttaagcgatagcgattttttcgagggttcgcgaggttgtttcggaattttttaggacgtatagttttattttgggaaatttatcggttttttttttttggtttttttcggcggttttcgggtttcgtttggattcggtaacgggatagggaggtcgttttttattttcgattgagtggatagtcgcgttttgttcgggtggatagttttttttttttttacgttagtttcggggtcgttaagttgtgtagttcgtgggtcgggagtatcgaacggatatagtttaggtcgtggtagggtttagagtgggatgttttatggtttttatttaggtttggggatatttttattcgttttttagaatcgggtcgtgggggatagaaggggtttgcgtgcgggtagggagagtattttggtttttttttgttttcggggtttataaagtgtgttgggatttgcggggttgttttgtttaagtttgggtttggcgttcgcgtttttgagtttgtgagtgcgtgcgtttttttgcgtttttttgattgtcggtgttggggttttgcgttttgcgttcgcg

SEQ ID NO: 15 - DNA, 2519 bp, Artificial Sequence
  chemically treated genomic DNA (Homo sapiens)
gatttatgagtgaatgattaaaagtgtagttgagttttggtagagggtatggggttttatttagagataggtagagaaagttgaagttttaggattggaggtcgtttttttttatttttttattaggtttaggtagggtttgatttgaacggaggtttgggaatttgtggttagtttttatttgttggaaaagagtagtttttaagtttaattgttttaggttgatgtttttttatttttttttatttatttatttttattattattttttttttattgagacggagttttattttgttgttaggttggagtgtagtggcgcgatttcggtttattgttattttcgtttgttgagtttaagttttagttttttgagtagttttttgggtagttgggattataggcgtgcgttattacgttaggttaattttttgtattttagtatagacggagttttattattttggttaggatggtttcgattttttgatttcgtgatattttcgtttcggtattttaaagtgtcgggattataggtatgagttatagcgttcggtttttagttttttttaaaaaacgttagattcgttcgttgcgttgagtggaggcggggtaggttttcgttttttaattggttttatttatcgagttttttttttgtgtcgggttttgtgttaagtatattatacgttgtattttgcggttaggttgttgtggtttagggtcgtattttggtttaaggtcgtaaatcgaggtgggatttcgattcggtaattacgttcgtggttcggaaacggcgttttttgaggtttaggagaggtcgggcggtgagcggttgtggagtcgagcgcgggtagtgcggatgttgtttatgggggaggtagttaaggacggagggcgagaggcggtttttttaaggttattttttttcgggttgtaagtaaaggttaggggatttcggaatggttagtgtaggagtttttttgtgttttttacgttttagatttttagagttttagaaacggagattatcgtttttatttttattttatagatgaagaaattgagtcgaggaaaggaagcgatttggttaaggtcggagagtttattttttgtagggcggggtttggaattcggggtttggttttcggtaacgcgttttcggttcgtagttttttgttttttgtgtttcgtttcggtttttagcgtagttgtagaggggtttttttcgacgtatatatttaagagttcgatcgcgcggttgaaatcgcggagttcggagtcgcggttggttgagcgatcgcggtttttgggttgcgtgcgcgttttttggagttgaaaggagcgttaggatcgggggcgttgtatcgggttgggttttttaacgttcgtagatcgggtcgggttgtagttggagatggtagtaatttcgggaggttttcgggtttttttagggtgcgtttaggaggcgggtttcgtgcgacgcggtgtagtttattttttttttcgagatcgtttaatttcgcgggggtagtttcgggcgttcggagacgcggaggtttagattgtagttttcggatgttggaagtttagattttttggggttatcggttttttcgttattttagttgtagagagttttattgttttatcgttcggagtttagtttttttgtttttttattagttttttttttcgtaggtttttggggatttttgatcgtttgtttttattttttttttgtttttatatttttcgtttttgttttaggaacggtgatatagttatcggattgttttttattttttgttagtttatattgtatataatttaataattcgcgtttttttattcgggtgatagagatatagataatttgagttagtggtgtttaaagtatcggttttagaatagtagtattagtattttttgggaatttgttaaaaatgagaatttgggtcgggcgcggtggtttacgtttgtaattttagtattttgggaggtcgaggcgggcggattacgaggttaggagatcgagattatttcggttaaaacggtgaaatttcgtttttattaaaaatataaaaaattagtcgggtatagtggcgggcgtttgtagttttagttatttgggaggttgaggtaggagaatggcgtgaattcgggaggcggagtttgtagtgagtcgagatttcgttattgtattttagtttgggcgatagagcgagatttcgttttaaaaaaaaaaaaaatgcgaatttgggggttttattttagatttattgaatagaaattttgtggagtttagtagatgatttttatgtatattaaagtttgcgagttattgatttaaatatttttttatttatttattttttatttggtttatttagtattgttagtgggagagatattcgtaaagtattaggttgtgagttttatcgtcgtgtattttgagatattgtttattagttttgggatggtaggtagaggtattttagtttggtttagtgtagatt

SEQ ID NO: 16 - DNA, 2519 bp, Artificial Sequence
  chemically treated genomic DNA (Homo sapiens)
ggtttgtattagattaagttggagtatttttgtttgttattttaaagttagtggatagtgttttagagtgtacggcggtggggtttatagtttggtgttttgcgggtgttttttttattggtaatgttgggtgggttaggtgaagaatgaatggatgaaagaatgtttagattagtggttcgtaaattttagtgtgtatgggaattatttgttgggttttatagagtttttgtttagtagatttggggtggggtttttaaattcgtattttttttttttttgagacggagtttcgttttgtcgtttaggttggagtgtagtggcgggatttcggtttattgtaagtttcgtttttcgggtttacgttatttttttgttttagttttttaagtagttgggattataggcgttcgttattatgttcggttaattttttgtatttttagtagagacggggttttatcgttttagtcgggatggtttcgattttttgatttcgtgattcgttcgtttcggttttttaaagtgttgggattataggcgtgagttatcgcgttcggtttaaatttttatttttaataagtttttaagagatgttgatgttgttgttttgggatcggtattttgagtattattagtttagattatttgtgtttttgttattcggatggaagggcgcggattattgagttgtgtgtagtgtagattaataggagatggagagtaattcggtgattgtattatcgtttttgagataagggcgggaagtatgggggtagggggagagtaagaataggcggttagaagtttttagagatttgcggagggagggattggtagaggaataaggagattaagtttcggacggtgaagtaatgggattttttgtagttggggtggcgggagagtcggtgattttagggagtttgggtttttagtattcggaggttgtagtttgggttttcgcgttttcgagcgttcgaggttgttttcgcgaagttaagcggtttcgggggggggggtgggttgtatcgcgtcgtacggaattcgttttttggacgtattttgaagaggttcggagatttttcgggattgttgttatttttagttgtagttcggttcggtttgcgagcgttgaggggtttagttcggtgtagcgttttcgattttggcgttttttttagttttaaggggcgcgtacgtagtttaggaatcgcgatcgtttagttagtcgcggtttcgagtttcgcgattttagtcgcgcggtcgggtttttgagtgtatgcgtcgaggggggtttttttgtagttgcgttgggggtcgaagcggggtatagggggtaggaggttgcgggtcgagggcgcgttgtcgagagttagatttcgggttttaaatttcgttttgtaaagaatgagtttttcgattttggttaagtcgtttttttttttcggtttagtttttttatttgtaaaatgggggtggggacgatgattttcgtttttgaggttttgaggatttaggacgtggaaggtatagagaagtttttgtattaattatttcgggattttttgatttttgtttgtaattcggaagagggtgattttggaagaatcgtttttcgtttttcgtttttggttgttttttttataggtagtattcgtattgttcgcgttcggttttatagtcgtttatcgttcggttttttttgggttttaggggacgtcgttttcgggttacgggcgtggttgtcggatcggagttttatttcggtttgcgattttggattagggtacgattttggattatagtaatttggtcgtaggatatagcgtgtgatgtgtttggtatagagttcggtataagggaagagttcggtggataaggttaattggagaacggaggtttgtttcgtttttatttagcgtagcggacggatttagcgttttttaaaaagaattaggggtcgggcgttgtggtttatgtttgtaatttcggtattttgggatatcgaggcgggagtattacgaggttaggagatcgagattattttggttaaagtggtgaaatttcgtttatattaaaatataaaaaattagtttggcgtggtggcgtacgtttgtagttttagttatttaggaggttatttaggaggttgaggtttgaatttagtaggcggaggtggtagtgagtcgagatcgcgttattgtattttaatttggtaatagagtaagatttcgttttaataaaaaaaaaataataataaaaataaataaataaaaaaaagtagggaagtattaatttggagtaattgagtttaaggattgtttttttttaataagtaaaggttggttataggtttttaggttttcgtttagattaagttttgtttgggtttggtggggaggtgaggaagaacggtttttaattttgggattttaattttttttgtttgtttttgggtgggattttatgttttttgttaggatttagttgtatttttagttatttatttataaatt

SEQ ID NO: 17 - DNA, 2283 bp, Artificial Sequence
  chemically treated genomic DNA (Homo sapiens)
aatgaagacgttggagatcgggtttttgttcgttttttttttgcgtttcgggatgaggtagagattgaatagtcggcgagtaaattaacggtatttagaaagttatgtcggattcggcgtttagcgtttaagcgttaattcgttgaaagttttttagcgaaattttagggacgatttggatttcgttgagaggaattgtttttgagtgagatggttttagaggtttggaggagcggattggtaagtatcgggagggtagtgggagttttgtttttgtttggtgttttgaataaggtttttacggttatttattatgagatttcggaggaaagagagaagggtttcgttgtgggtaacgtggtcgcgaattttggtttggatttcggtagttttttagttcgtaggtttcgggtggtgtttggagttagtcgaagattttttgaggtgaatcgggagatcggagagatgtttgtgaacgatcgtttggatcgagaggagttgtgtgggatattgtttttttgtattgtaattttggagttggtagtggagaattcgttggagttgtttagcgtggaagtggtgatttaggatattaacgataataattttgttttttttatttaggaaatgaaattggagattagcgaggtcgtggtttcggggacgcgtttttcgttcgagagcgcgtacgatttcgatgtgggaagtaattttttataaatttatgagttgagtcgaaatgaatattttgcgtttcgcgtgtagacgcgggaggatagtattaagtacgcggagttggtgttggagcgcgttttggatcgagaacgggagtttagtttttagttagtgttgacggcgttggacggagggattttagtttttttcgttagtttgtttatttatattaaggtgttggacgcgaatgataatgcgtttgtttttaattagtttttgtatcgggcgcgcgttttggaggatgtatttttcggtacgcgcgtggtataagtttttgtaacggatttggatgaaggttttaacggtgaaattatttattttttcggtagttataatcgcgtcggcgtgcggtaattattcgttttagattttgtaatcgggatgttgataattaagggtcggttggatttcgaggatattaaattttatgagatttatatttaggttaaagataagggcgttaatttcgaaggagtatattgtaaagtgttggtggaggttgtggatgtgaatgataacgtttcggagattatagttattttcgtgtatagtttagtattcgaggatgtttttttggggattgttatcgttttgtttagtgtgattgatttggatgttggcgagaacgggttggtgatttgcgaagttttatcgggttttttttttagttttatttttttttttaagaattattttattttgaaaattagtgtagatttggatcgggagattgtgttagaatataattttagtattatcgttcgagacgtcggaatttttttttttttagtttttataatagtgcgtgtttaagtgttcgatattaatgataattttttataatttttttaatttttttacgacgtttatattgaagaaaataattttttcggggttttaatattaaatttaagtgtttgggatttcgacgtttcgtagaatgttcggtttttttttttttttttggagtaaggagttgaaatcgggttagtgggtcgttattttataataaatcgtgataatggtatagtgttatttttagtgtttttagattatgaggatcggcgggaatttgaattaatagtttatattagcgatgggggtatttcggttttagttattaatattagcgtgaatatatttgttattgatcgtaatgataatgttttttaggttttatattttcggttaggtgggagttcggtggagatgttgtttcgaggtattttagttggttatttagtgttacgggtggtaggttgggacgcggatgtagggtataatgtttggtttttttatagttttttgggattttttaattagagtttttttgttatagggttgtatattggttaaattagtattgttcgtttagtttaagatatagatttatttaggtagatttttacggttttgattaaagataatggggagttttcgttttttattattgttatttttattgtgttagtaatcgaggatttttttgaagttcgagtcgagtttttttttggttttgtttttcgggagtagaaaaaaaattttatt

SEQ ID NO: 18 - DNA, 2283 bp, Artificial Sequence
  chemically treated genomic DNA (Homo sapiens)
ggtgagattttttttttgttttcggggggtagagttagaggggaattcggttcgggttttaggagagttttcggttattgatatagtgagggtagtagtggtggagagcgaaggttttttattgtttttgattaagatcgtgagagtttgtttgggtgaatttgtgttttggattggacgggtagtattgatttgattagtgtgtagttttatggtaaaaaggttttggttaggggattttaagagattgtaggagagttaggtattgtgttttgtattcgcgttttagtttattattcgtgatattaggtggttagttgaggtatttcgaggtagtatttttatcgagtttttatttggtcgaggatataggatttggggggtattgttattgcgattagtgataaatatgtttacgttgatgttggtggttaggatcggggtgtttttatcgttgatatgagttgttaatttaaattttcgtcgatttttatagtttaggggtattaaggatgatattatgttattgttacgatttattgtgaaatagcgatttattagttcggttttagttttttgttttaagagaaagaaagaaagtcgagtattttgcggggcgtcggggttttagatatttaggtttagtattggagtttcggggaggttgttttttttaatgtaaacgtcgtaggaagattgagaagattgtggagggttgttattgatgtcggatatttgaatacgtattattgtaagggttgagagggaaggggtttcggcgtttcgggcggtgatgttgaggttgtattttggtatagtttttcgatttaggtttgtattggtttttaaagtgaagtaatttttgagggaagaagtaaggttgaaagggagattcggtggaatttcgtaggttattagttcgttttcgttagtatttaggttagttatattgagtaaagcgatgatagtttttagaggggtattttcgggtattgggttgtatacggaggtgattgtgattttcggggcgttgttatttatatttataatttttattaatattttgtaatgtgttttttcgggattggcgtttttgtttttggtttggatgtaaattttatggagtttggtgttttcgaagtttagtcgatttttgattgttagtatttcggttataaggtttaaggcgaatagttgtcgtacgtcggcgcggttgtggttgtcgaaggagtaaataattttatcgttggggtttttatttagattcgttgtaaggatttgtattacgcgcgtgtcggagggtgtattttttaggacgcgcgttcggtataaggattggttgaagataggcgtattgttattcgcgtttagtattttgatgtgaataggtaggttggcggagagagttggggttttttcgtttaacgtcgttagtattaattggagattaggttttcgttttcggtttagggcgcgttttaatattagtttcgcgtatttggtgttgttttttcgcgtttgtacgcgaagcgtaaagtatttatttcggtttagtttataggtttgtaaagagttgttttttatatcgggatcgtgcgcgttttcgagcggaaagcgcgttttcggagttacggtttcgttaatttttaattttattttttgggtagggaaagtaggattgttgtcgttgatgttttggattattatttttacgttgaatagttttagcgggttttttattattaattttagagttatagtgtaagagggtagtgttttatatagtttttttcgatttagacggtcgtttataaatattttttcggtttttcggtttattttaaagaattttcggttagttttagatattattcggaatttgcgggttgagaggttatcgagatttaaattaaggttcgcgattacgttgtttatagcgaaatttttttttttttttttcgggattttatagtgaatgatcgtggaagttttgtttaaggtattaagtagaagtaaaatttttattattttttcggtgtttattagttcgtttttttaggtttttgggattattttatttaaaagtagttttttttagcggggtttagatcgtttttgagatttcgttgagaaatttttagcgggttagcgtttgggcgttgggcgtcgagttcgatatggttttttggatgtcgttgatttgttcgtcggttgtttagtttttgttttatttcggggcgtagaaaggggacgggtaggggttcgatttttagcgtttttatt

SEQ ID NO: 19 - DNA, 2236 bp, Artificial Sequence
  chemically treated genomic DNA (Homo sapiens)
taggtgttaacgatcgcgttagattggcgttggaatttttgggttataaggttttagtgggtggcgttattatttttgcggtttgtaaaagcggagtggttttgttaggcgggaagttttttttttttttttagattcgcgataggtcgtaggtaagaattagcgtaattagggcgcgttcgtatagatttggaggcggttgtatgttgttatttgttttagaaggcgttcggtggtcgtttcgtagttttagagtttagagataagtagaggaaggaagataggatatttgggttagttgttcgagttaagtcgttgtaaacgttaatatcgttcgtagttttttcgttagtatttacgtttaaaagtaatttaagtttgcgcgttagtgggaaatttggcgtttatgattcgttagcgcgggtcgaaatttttttttgatgtttttttagttgttttttttttttcgcgtggttaggaggggtaaataatatgtagtggggcggggcgttttggaaggggtgtgttagggagggaatgatgggggttttaggtaaagtttcgaatttttttacgtaacgggaggaatatagatacgttttagttaagcgtgcgtgggaatcgcggaattaaggtatttagaggttaagggtttgtgttaagttttgtattttgtttcgtaggggaatttttatatttcgcgattgaattcgaaagatttttttcggcggatgaaagtcgttattttttggttggttgagttatagttttcgtagcgcgtttaggagtgcgtcggagattcggaaattcgtagagattttttaagttagtaggaatttggaaatcgttgttttttttaaacggttttaaatattcgcgtttttttttttatttaatttaattttaatttgttttttttataggtttaatttttatttttttaaaattttaaattagtaagttaaatcgaagttttagaataaggtttaattaatgattttaatttaatattaagttcgaatgtttatttttcggatttgataaattagatgtagagcgacgaatggagattattttttcgggaggcggaatttagttgggttttagtttgttttgggagaggagtacgttttttttgagttgtaggcgggttcggttttgacgaaacgttgcgagaatgttagatagtgtagtttttatcgtttgttcggggtttttgttgttattagataagtatttttatttatttatttttttttattaattatcgttagatttttttcgcgtttttcgatttcgttgtaatttttttttttgggcgatgtttggatagtattagtagtagttgttcgagggaggggggtagttttcgttcggggataggttttaaaaggttgtttatttgttagagttttacgttttttaaatgaatttaaattaagggtaagttattacgtattatgtgatattcggtagttttagattagaataaggttttgtattgaacgtgataattgaatttttaatgttaagtgttattttttttttaggtaaatgtttcgtcgttgtgatatttaaggttggtttgtgggcgttgttttttgttttgttttattttgttttgaagttttattttaagttaatattaattttaatacggaatagttcgattttttttttttaggtttttttattgtttcgagagaggattataagtattttttattttttttagtatagttttttttttttttttttgttatagtatcggtgttaggtaattttaggtatttttatattgtatttatgatagatttgatgtttatcggagatatgaaaataattagaaagttgttatgtaaatttaatatgatatttatttattaggtagagtaatataataaggtttttttatttatttttgagttttatgtttatcgtagagaggaaaataatagcgattggtagttttgtttagagattgtataaaagaggttaggaagttaggtttggagatgtattggagagtattgtgtcgttttttaattagtaaaatttttattggatttgtggaattttaaatttagaagtatttattttatgtagtagttttatttagagataggaggttcgttttttgttttatgttagttaatggaatagatgggataagaattttggatttttggtttttaggtaatgttttttgggatagtggaagtagaaaattaatttt

SEQ ID NO: 20 - DNA, 2236 bp, Artificial Sequence
  chemically treated genomic DNA (Homo sapiens)
gaaattgattttttatttttattgttttagaaagtattgtttaagagttaaaaatttaaggtttttgttttatttattttattaattaatatgaagtaaaaaacgagttttttgtttttgggtgaaattgttatatggaatgggtgtttttgggtttgaagttttatagatttagtagggattttgttgattggaggacggtatagtattttttagtgtatttttaagtttgattttttgattttttttatataatttttgggtaaaattattagtcgttgttatttttttttttgcggtaaatatggagtttaagaatggatagaaagattttattgtattgttttatttggtaaataaatattatgttgaatttgtatggtagttttttgattatttttatgttttcgataagtattaagtttgttataggtatagtataaaaatgtttgagattgtttaatatcgatattgtggtaggaagagaggagaagagttgtattggggaaaatgaggagtatttgtaattttttttcggggtagtgagagggtttgggaagaaaagatcgagttgtttcgtgttggggttaatgttggtttgaaatgaaattttagggtaaaatgaagtagagtaaagagtagcgtttataaattaattttaaatattatagcggcggaatatttatttgaaagaaaagtgatatttggtattaaaagtttaattattacgtttagtgtagagttttgttttagtttggagttgtcgggtgttatatggtgcgtgataatttgtttttgatttgggtttatttgaagagcgtagaattttaataaataaatagttttttgggatttgttttcggacgaggattgtttttttttttcgggtaattattattgatgttgtttaggtatcgtttaaggggaaaggttgtagcggggtcggaaggcgcgggaggagtttggcggtgattgatgggaagggatgaatgaataaaagtatttgtttgatggtagtagagatttcgagtaaacggtggaggttatattgtttggtattttcgtagcgtttcgttagagtcggattcgtttgtagtttaagggaggcgtgttttttttttagagtaggttggaatttagttgggtttcgtttttcgggaaggtggtttttattcgtcgttttgtatttggtttgttagattcgagaggtaaatattcgggtttggtgttgaattaaaattattgattgaattttattttggggtttcggtttggtttattagtttgggattttaaaaaaataaaaattaagtttatagagagggtaaattaaaattaggttgggtaaaggaaggagcgcgagtgtttgaagtcgtttggagggaatagcggtttttaagtttttgttgatttgagaagtttttgcgggttttcgaattttcggcgtatttttgggcgcgttgcgggagttgtagtttagttagttagggagtagcggtttttattcgtcgggaggagtttttcgagtttaatcgcggggtatagaggtttttttgcggggtaaaatgtagagtttgatataagtttttggtttttaggtgttttaatttcgcggtttttacgtacgtttaattaagacgtgtttgtatttttttcgttacgtgaaagagttcggagttttgtttgggatttttattattttttttttggtatattttttttagaacgtttcgttttattgtatattatttattttttttggttacgcgggggaagaaaaatagttgagagggtattaggaaggagtttcgattcgcgttggcgagttatgagcgttaagttttttattggcgcgtaaatttgagttatttttgagcgtggatattggcgaagaggttgcgggcggtattagcgtttgtagcgatttggttcgggtagttgatttaagtgttttgtttttttttttttgtttgtttttaggttttgaaattgcggagcggttatcggacgttttttggagtaggtagtagtatgtagtcgtttttaagtttgtgcggacgcgttttggttgcgttggtttttgtttgcggtttgtcgcggatttggggagaggagagaggtttttcgtttgatagggttatttcgtttttgtaaatcgtagagataatgacgttatttattaagattttatggtttaagggttttaacgttagtttggcgcggtcgttggtatttg

SEQ ID NO: 21 - DNA, 2204 bp, Artificial Sequence
  chemically treated genomic DNA (Homo sapiens)
tttttttgtaaatcggtttaagtttcgggaggtgggattgggggaggagggggtttattttggggttaggttagggttgggtggaggaggcggttttcgagagagtgagtcgggaaagaaggggagtgggtaaagggtgagatgtggggtttcggttttcgtttcgttggttgttagttttttttgcgttttttagttcgcgtgcgtgatacgagatagtgtagttttggtatggggtttggtatttggcggtcgcgagataattagggttcgtgcgatgggaaacgtgtcgttggtagttcgttatttttttatcgtgattttagtttgttaaatagggttcgtgatgtttagtttattagggaggagtcgcggttttgagatttcgtttagttcgaagtagcggagattggttaggagttcggttgttagatttcggagcgtacgttgcgggcgggggttcggtttacgggggagggttaggggacgcgggatttatttttgaaggagtcggggagtcgttgggtttcggagtttcgtgtgtgtcgtttttcggttatgttgttcgagacgtagtcgtattttttcgttttcgttgttaaattcggagtcgtcgggaatgttttgaggagttagaggtataagatttagattgtcgtttcgtttttaatcgaggtttcgttttcgtgagagttggttaattaacgtttaggatcgaggaggatttattttttaattttcgtttttttgtttttttacggcgcgattgtttcgtagttatttttcgttagttttgtgggttgaggggcgtggtttgaggggcgtggtttgaggggcgagagtttttaaggttgtgggtatgaggtcggggttttgtatcggaagggagggcggaagttacgggacgtggagtagatggtgaggatagtggggaggtagtagtagaggatgattcgaggtaaaagtgtaagtgaagaaaagtcgttttgtcgggtagaggtacgggattaaggcgttttttttgggttgaggagttagagggaagaaaatggcgttttgttatgagggcgcgaggttcgagttgaggggagaagattgagggatatagaagtggtcgaagtgagggcgttgaggttagtttgagttgagagggtcggtagattacgtcgtagtcgaagtgaacgaattcgagtgaggtgtgttaagaaaattaaaatgtataaatttggaaaaggagaggaggtcgggcgcggtggtttacgtttgtaattttagtacgttggaaggtcgaggcgggtagattatttgaggttagaagttcgagattagtttggttaatatggtgaaatttcgtttttgttaaaaatataaaaattagtcgggcgtgtggcgcgcgtttgtaattttagttatttgggaggttgaggtaggagaatcgtttgaatttgggaggtagaggttgtagtgagtcgagatggtttgggtgatagagcgagatttcgttttaaaaaaataaaataaaaaataaaaaaataggagaggagattttattttttgtaaggggttatagtttgtaaggtggttatttcgtaggttggagaatggttaggattagagataggtatttcgttggaggaggggttggagtagcggttttatgttgaatagtttgggtagatatgtatatttagtaggtgataggaggagttatgaatatttatgagggtggttttgacgtatgtttattgagtaaatatgtatgtaatatataatttatgtttattttggagtgaagagttattaattaaatgttaaatgtttggtttgtatggtgacgtttttatttttataaaaagtaaaaaaaaaatagttaggtggggtggtgtgtgtttgcggttttaattagttaggaggttggggtaggaggattatttgagtttaagagttggaggttgtagtgatgtatgattagattattgtattttagtttgatggattttaaaaaataataataatatatgtattatagttagattttatgcgttaaaaggtttttttaggataggaaggtgtgtaagtatgtagtttgtgtaaattagttagagttagtttatggtcggtagtttttttatgaggagaaagttattgaaattagttttttgtttaattaaagttgtaatgatggttggtggaataggggtttt

SEQ ID NO: 22 - DNA, 2204 bp, Artificial Sequence
  chemically treated genomic DNA (Homo sapiens)
ggaatttttattttattagttattattatagttttaattggataagaggttgattttagtaattttttttttataggaaaattatcgattatggattggttttggttagtttatatagattgtatatttgtatatttttttgttttgaaaagattttttgacgtatggggtttaattgtaatatatgtattgttattattttttagagtttattaggttggagtgtagtgatttgattatatattattgtagtttttaatttttgggtttaagtgatttttttgttttagttttttgattagttgggatcgtaagtatatattattttatttggttattttttttttattttttgtagagatggggacgttattatgtaggttaggtatttaatatttaattggtaattttttattttaaaatgaatatgggttgtatgttatatgtatgtttgtttaatgggtatgcgttaggattatttttatgaatatttatagttttttttgttatttgttgaatatgtatgtttatttaagttgtttagtataaagtcgttattttaattttttttttaacgaaatgtttgtttttggttttggttattttttagtttgcggaatggttattttgtaggttgtaattttttataagaaataaagtttttttttttgtttttttgttttttgttttgtttttttgagacggagtttcgttttgttatttaggttatttcggtttattgtaatttttgttttttaagtttaagcgatttttttgttttagttttttaagtagttgggattataggcgcgcgttatacgttcggttaatttttgtatttttagtagagacggggttttattatgttggttaagttggtttcgaatttttaattttagatgatttattcgtttcggttttttaacgtgttgggattataggcgtgagttatcgcgttcggttttttttttttttttaaatttatatattttgatttttttaatatattttattcgagttcgtttatttcggttgcggcgtgatttgtcggtttttttagtttaggttgattttagcgtttttatttcggttatttttgtgttttttagttttttttttttaattcggatttcgcgtttttatgatagggcgttatttttttttttttaattttttagtttagaggaggcgttttggtttcgtatttttgttcggtaaggcgatttttttttatttgtatttttgtttcgggttattttttgttgttatttttttattatttttattatttgttttacgtttcgtggttttcgttttttttttcggtgtagggtttcggttttatatttatagttttgggggttttcgttttttaggttacgttttttaggttacgttttttagtttatagaattagcgggaagtgattgcgaagtagtcgcgtcgtggagggataggagggcggggattgggaggtgggtttttttcgattttgggcgttgattggttaatttttacgagggcgggatttcgattgggggcggggcggtaatttgggttttgtgtttttggttttttagggtattttcggcggtttcgggtttggtaacgaggacgggggagtgcgattgcgtttcgggtagtatggtcgagaagcggtatatacgggatttcgaagtttagcggtttttcgatttttttaagggtgagtttcgcgttttttgattttttttcgtggatcgagttttcgttcgtagcgtgcgtttcgaggtttgatagtcgggtttttggttagttttcgttgtttcgggttgggcgagattttaaagtcgcggtttttttttagtaaattgagtattacgaattttgtttggtagattgaggttacgatggaggggtggcgggttgttaacggtacgttttttatcgtacgggttttggttatttcgcggtcgttagatgttaagttttatgttagggttgtattatttcgtgttacgtacgcggattaggaaacgtagagggaattggtagttagcgaggcggggatcgggattttatattttattttttgtttattttttttttttttcgatttattttttcgaaggtcgttttttttatttagttttggtttggttttagggtgaattttttttttttttaattttatttttcgaaatttagatcgatttgtagaagga

SEQ ID NO: 23 - DNA, 2137 bp, Artificial Sequence
  chemically treated genomic DNA (Homo sapiens)
ttttattagttagtatttaattatttaaaagtgtggtttatgtttggaattgggttataaagatggtaatgtgttaaattagatatttgttttttgtatatttttataaattatattagtttattttataattttgtttttgttagttataaagaagaaagtttaatattttagacgtttatattttattaaattgtgggtgaagagttagtgagcggtaaaaggtggtcgttttgagttgtggtgatggaatttttagggaatagttaggagtttggaaagttatttttgagttggtttatttaagtattcgggatagaagtggttagtagaaattttttatggaattttaaaatattattaggatagtagttttacgatatttttaaaatttggagtttaaaaaataatgaagtataatttatttagaatttaagtattaagggaaaacgttaagttttgttttattttaaagatttttttttgaggaaaatatgttattgttttttagatgtgaatgaaatgatattttttttttcgatatagtttttttgtttacgattttatattgtttttttttaattttttttattattgaaatattatatgtaagatttgttggtatgttttttgattttttatgtttaaggggaaaaatgtttgtagttgatgtttgagttttaggagttcggtgaagaaaaaaaaaaaaagtaacgtaaggaaaattgttttaatggtatattttttttaaagtttgaagttttataggtaaaaggagggataaatatttttttttgaaagtaaatagttaaggtttttttttatttaattatttttgaattttttgtaattttttcgaggtttaaatttagggtataattaattttagattttattttaaatttaattcgttttttatttgtaatttgtttgtaggtgggttttttttttttaaattataaatttgaatttgcgttaattttttataatataaggtatttaaagttttttggagttattgatttggtgacgttgtagtgtacgtttgtatttgaaagtaagtaagagaatagaaagcgagtaagagaatcgtaatttttattattttggcgaatttttgtcgggatttatatattaaatagtatttgtatatagacgttttaagtcgttttttttagagtcgttatttagatttgtaaggggcgggggattagtggaaatttaaatagaaatttttattattataaaggcgagtttttattgattatggtaattgttttgtttaggttgtacgggtatggttaattttgtttgaaagttcgttttttttttgcgtttttttgtcgagttttttttaggttttggtttttttcgacggtggtaagggatgttttttacgttttttattatttttgttcgcgtttgcgttttttgttcgaggttttaggtcgcggcggcggcgcggtgggtttattagcgggcgcgtcgggttcgcgtagcgttgtttgtagtcgcgtcgtcgtatttattattattatattagcgcggggaagtttacgtcgagttttttcggtttcggcgcgttttagttagcgcgttagtaaatagaatatgttggattgtttagagacggttttgggtgtttgggggtagaaggggtgtttttaggttcggttttgattcgtatttttgaagttggttttgggagataatgtattttcgttagttaggtcgcgggaaaagtgaaaaaagggttgggggttatgtgggggtggggaggtgagttttagcgttagtagcgtttggtagtttttttttagtgtagagaagcggtttgtattaaggcgtattagagtggttattttgtttttcggaatatttacgggtatttgtaaattttatagttggtttagttaaatttttagtaaatattggtaagggtcggttttggttgcgtttagagggtttttttaattggttgaatttagggagttgtaattttttaggtattttgtaatgtaattattttgagtgtcgtattataataaaatattggggattttttgaaaagtttttataaaattaataggtgtgtgtttcgtttataaaacgtcgaatttattttttatgaatttgg

SEQ ID NO: 24 - DNA, 2137 bp, Artificial Sequence
  chemically treated genomic DNA (Homo sapiens)
ttaggtttatagaaggtgaattcgacgttttgtgagcgaagtatatatttattggttttgtgaaggttttttaagggatttttaatgttttattataatgcgatatttagggtggttgtattgtaaagtatttggaaggttgtagttttttgaatttagttagttaaaagagttttttgaacgtaattagggtcggtttttgttagtgtttgttggaaatttggttgggttaattgtagagtttgtaaatgttcgtgaatatttcgaggagtagggtgattattttgatacgttttgatatagatcgtttttttgtattggagggagattgttaggcgttgttggcgttggagtttatttttttatttttatatggtttttagttttttttttatttttttcgcggtttggttggcggagatgtattgttttttaaagttagttttagaaatgcggattaaagtcgggtttgggagtattttttttgtttttagatatttagagtcgtttttgagtaatttagtatgttttgtttgttggcgcgttgattggggcgcgtcggggtcgggagaattcggcgtggattttttcgcgttgatgtaatgatgatggatgcggcgacgcggttgtagatagcgttgcgcgggttcggcgcgttcgttaatgaatttatcgcgtcgtcgtcgcggtttgggatttcgggtaggggacgtaggcgcgggtaaaagtggtgaaaggcgtgaaaaatattttttgttatcgtcggaggaaattagaatttgaagggaattcgataggaaagcgtagagaaagagcgagtttttaaataaaattggttatattcgtataatttgagtaaaataattattataattaatggggattcgtttttgtaatggtgaaagtttttgtttgggtttttattggtttttcgttttttgtaggtttaagtgacgattttaaagaggacgatttgaggcgtttgtgtgtaagtgttgtttaatatgtaggtttcggtaagaattcgttaaggtggtaaaggttgcggtttttttgttcgttttttgtttttttgtttatttttaaatgtagacgtgtattatagcgttattaggttagtggttttaggaagttttaaatgttttgtgttgtaagaggttgacgtaggtttagatttataatttagaaagaaaagatttatttgtaggtaggttgtaaataggagacggattagatttaaaatagggtttggaattaattgtgttttgggtttaggtttcggggaaattataaaaggtttagggatagttgagtgggaaaaagttttgattgtttgtttttaggaaggaatgtttatttttttttttatttatgaaattttaagttttaggaaggatatattattagagtaattttttttgcgttgttttttttttttttttttatcgagtttttgggatttaaatattagttataaatatttttttttttaagtatgaaaagttaaggggtatgttagtaaattttgtatgtaatgttttagtggtgaaagggattgaaggagaatagtgtggagtcgtaagtaaggaaattatgtcgggggaaaaagtattattttatttatatttgaaaaatagtggtatgttttttttagggaaaagtttttgaagtgaagtagaatttaacgtttttttttgatgtttaagttttaaataaattatattttattattttttaaattttaggttttaaaagtgtcgtggagttattgttttagtggtgttttgagattttatgaggaatttttattgattatttttatttcgaatgtttgaatggattagtttaggagtgattttttaagtttttgattattttttgaaaattttattattataatttaaagcggttattttttgtcgtttattgattttttatttatagtttgatgaggtgtgggcgtttagaatgttaaatttttttttttataattgatagggataaagttgtaaaataagttgatataatttataggagtgtataggaagtagatgtttgatttggtatattgttatttttatagtttagttttaagtataaattatatttttaaataattaggtattaattaatgaga

SEQ ID NO: 25 - DNA, 2461 bp, Artificial Sequence
  chemically treated genomic DNA (Homo sapiens)
tttttttttttttttttttttttttttttttttttttttttttttttttttttttttttttttttttttttttttttttttttcgtttttttttttttttttttttttgttttttatttttttagtttgaaggttgtattttttttatttttttaagtaaagttgggagttttgtagtattttaggagtgaggataattatgtttaagaaattttggttttagtttagttttagattaagaggaaaatattttaaaattttaaagtaaattttaaaagtgtaatttatattagagcgattgatttggtatttatgtagattgaagtttgagaagtaatttaagtggtttttatttatttttttggaagagtttttagaatgtatttttattggtttgaaaaacgtttgaaaaagagttttgatgttaatagtaatggaaataggagggttggtggtttacgattagtttagtggtattttttattttatttgtatttaggtaaagagattgtggtttgtatgtgattaaataatttgttgaagcgttttgggtttagggtatttaatttttgtgaagtaggattattagttgtttgttttgtttttgtgttattttttagaatatattaaagtaggggtaatttttgagtttagatttttgttatgtgaagattttttgaaaattttgataaatataggtattgcgtaagtggttagttaattaaagaggggaggtggagttgttttttgtgtatttaataagtatttattattttatttgagtatgaaaagaggttattgttattatttttaagaaggaaagtaagtaggatagtttatatttttagaataattttttattaaatggaataatttcggtgaaaagtgggagtgaggaagaaagaaaaaaaaaatttttaattataatgtttgggaataagaaaggaagaagaaatttacgttaaagtcgatttttttttgtagttgtaaaataaatttttaagattttttttgttgaaattttggagaggaaaattggagtggcgggtgggttttgtttgtagtttaattttttttcgcggcgcgggcgcggttgggtttagtatttcggaaagcgtttttcgcggcgtttcgggattacgtatgttttttggggttcgtcgttttggtcgtgtaagtgttatcgtaattggtgagagtcgttggtaatttattcggagttgataatcgcggagagacgtagatatttattgatttttaggaagttgagcgtggtggatggaattttacgatttttttttttttaaggacggaaattttatttaagtagttttagaggaaacggataaaggtatttgaaagggagcgagcggttttaaatcgtataattgagcggttgggggagttatgcgttagtgttttagtgatcgcgggatacggagaggggaagtttgcgttgtatataaggatttagggatttcgagtttggtttgagaatttttggacgtcgagtgtttgttttacgggttgtattttttaattttgttttaaagtagtcgttgagtttaatttttgcgtttagggcgttcgttgcgcgttaggacgcgtttagtatttagtttttgggttttttttttagtagttgttttgaaagtttttacgtacgtttcgtaggttagtttggtaataaaattggggtaaatcgtgttattttaggttttgttttttagaatatgatttagaggtatttgcgtatgtagatggtcgatgtagttacgatagttattatgaataaggtagtaggcggggataagttagtagaattttttagtttggtttcggattttttggaggcggttaatacgagtggtaacgcgtcgttgtagttttcggatttgtggtgggagttggggttggagttgtcggacggcgcgtcgttaggatatttttcgggtagcggcggggtagagagcgcggatatagaggttcgggtgcggatttttattagcgtggtgtattgggtggtgtgcgttttggggttggcgggtaatttgttggttttttatttgatgaagagtatgtagggttggcgtaagttttttattaattttttcgttattaatttggcgttgacggatttttagtttgtgtttattttgtttttttgggcggtggagaacgtttttgattttaaatggtttttcggtaaggttatgtgtaagatcgtgtttatggtgacgtttatgaatatgtacgttagcgtgtttttttttattgttatgagtgtgacgcgttattattcggtggtttcggttttgaagagttatcggattcgaggatacggtcggggcgattgttgcggtcggagtttgggggatagttgttgtttttcggttaaggcgttgtgtgtgtggatttgggttttggtcgcgttggtttcgttgtttagtgttattttttt

SEQ ID NO: 26 - DNA, 2461 bp, Artificial Sequence
  chemically treated genomic DNA (Homo sapiens)
gagaaaatggtattgggtagcgaggttagcgcggttaaagtttagatttatatatatagcgttttggtcgagaagtagtagttgttttttaggtttcggtcgtagtagtcgtttcggtcgtgttttcgggttcggtggttttttagagtcgaggttatcgaatggtagcgcgttatatttatggtagtgaggaagaatacgttggcgtatatgtttatggacgttattatggatacgattttatatatggttttgtcgaagggttatttgaagttaagagcgttttttatcgtttagaagggtagggtgagtataaattgaaagttcgttagcgttaggttggtgacgaagaggttgatagaggatttgcgttagttttgtatgttttttattaggtagagaattagtaggttgttcgttaattttagggcgtatattatttagtatattacgttgatgagaattcgtattcgggtttttgtgttcgcgttttttgtttcgtcgttgttcgggggatgttttggcggcgcgtcgttcggtaattttagttttagtttttattataagttcggaagttgtagcgacgcgttattattcgtgttggtcgtttttagaaggttcgggattagattgaagagttttgttagtttgttttcgtttgttgttttatttatggtggttatcgtggttgtatcggttatttgtatgcgtaggtatttttaggttatgttttgggggataagatttaagataatacggtttattttagttttgttgttaggttagtttgcgggacgtgcgtgggagtttttaaagtagttattgaagagagagtttaggaattgggtattaagcgcgttttggcgcgtagcgaacgttttggacgtaggagttgagtttagcggttgttttggagtagagttgaggagtgtagttcgtaaggtaagtattcggcgtttaagggtttttaggttaagttcggagtttttaggtttttatgtataacgtagatttttttttttcgtgtttcgcggttattggggtattggcgtataatttttttagtcgtttaattgtgcgatttggggtcgttcgtttttttttaaatatttttattcgttttttttgggattgtttggatgaggttttcgtttttggagagaaagagatcgtagagttttatttattacgtttagttttttggaggttagtgggtgtttgcgttttttcgcggttgttaatttcgggtgggttgttagcggtttttattagttacggtggtatttgtacggttaaggcggcgggttttaaggagtatgcgtaatttcggggcgtcgcgaggggcgtttttcgaggtgttgaatttagtcgcgttcgcgtcgcgagggagagttgagttgtaggtaaagtttattcgttattttagtttttttttttagagttttagtaggaagggttttaagagtttattttatagttgtaggagaaagtcggttttgacgtgagtttttttttttttttttatttttaaatattatgattagaagtttttttttttttttttttttatttttattttttatcggaattattttatttggtgaggaattgttttaaaaatatgagttattttgtttatttttttttttgaaagtaataatagtggtttttttttatgtttaaatgagataatgggtatttattggatatataaaggatagttttattttttttttttaattagttgattatttacgtagtatttgtgtttgttaggatttttaaagggtttttatatggtagaagtttgggtttaagggttgtttttattttaatgtattttgagaggtgatataaaaatagagtaaataattgatggttttattttatagaaattaaatgttttaagtttaaagcgttttaataaattgtttgattatatataggttatagtttttttatttagatgtaaatagaatagaggatattattgggttgatcgtgaattattagtttttttatttttattattgttagtattaggatttttttttaggcgttttttagattaatggaagtatattttaaggatttttttaagggaatgagtggaaattatttgaattattttttaagttttagtttatataaatgttaggttaatcgttttggtgtaaattatatttttaggatttattttaaaattttgaaatgttttttttttggtttgggattaaattgaaattaaagttttttaagtataattgtttttatttttggagtattatagaatttttagttttatttaaggagataaagaggatgtaatttttaagttgaggagataagaaatagaaaaagaaagaaagagaaaaacgaaaaagaaagaaagaaagaaagaaagaaagaaagaaagaaagaaagaaaagaaaagaaagagaaaaaggaaaaaagaaaaaaa

SEQ ID NO: 27 - DNA, 1920 bp, Artificial Sequence
  chemically treated genomic DNA (Homo sapiens)
ttaggttgtcgtagatatagtttttgttttttcgaaaaatacgttttaggcgtcgggattttagatatttgggaaatagagtgtacgtagttgttgagaggtttcgcgtttggttttttttattattgaggcgtagaggtgttgtggatagtttagatttatacggcgttcgaggtgaaatagaatttttagtttttttatgaggttattggtattttcggttgtttttagagtttttcgatttagagttgaatgtaaagtaagcgttcgaaatgtagaagtagtcggggtcgtttacggtatttgtttcgttcggggcgagagaagacgttaggttgaggttttagcgattttaggtattagtttcgaaggagggcggggagatcgtaaaggggaagtgttcggagggttaacggttttcgcgtattttgcgtttttttgaagcgcgtcgttttttcgcgtcggggattgggatttgtttttggggaattcgtttagaagacggcggcggattggggtcgggtattttttagggttgttaggttttttttagttttgtatttgtcgcgtcgttttatttcgttaggaagttttagagatttcggggatggggtgggagcgtttttttatcgcgggtttaaaaagaaggaaggacgtttttaggggtcgtagaaggaggattagttttaagttataatttttttcggatttaaggtaggtcggttggggtttcgcgtttatacggtttttggcgggggttcgcgcgtttcgggagtttcgcggttcggggaggaaagaggagataagagataggcgaggattacggggttgatttagtcggggtagggattatcgtggaaaaattttggcgaggtggggggacgcggaaagagagcggttcgcgttttgtattttgcgtcgggtatttcgcgttagtgtttcgtttttagtgtttcgcgtttcgcgtttcgcgttttgtttttatttcgggttagttgtatcgcgttcgcgtcgtaggaatcgtggagttggaaagtgggggcgtcgcggttggggggttgttttagttgcgtttcggttagcgatcggcgggtcgggtttaaatttagttaggttgggtaggcggtggtcgcgcgattggggatcgggcgtttcgtttttttcgtttttttttttttttttttttttttttttagttttttggttttttttagtttttatcggatttgttcgttcgttgtttttttttttttttcgttttttatattattttttattttttcgttttgttttcgtttttttttttttttttgttttttgttttttttttttttttttttttttttaggggcggagtttttttttttttttttagataatgttgtggttgcgttttttttttcgttagttcgtttaggttttcgtcgttagcgattttttcgggttgggggtggggaggtggggggggagtgtagggttggggaggatgagttggttttttttatttttttgttgttgttttttttaagagggatggagatttggtttaagtttttcggtttattcggagttgtgatagttatttttagggaatagttacgttgttttattaagtttatttttagcggtttggattttttaggtagaggttgtgggattttgttttttttaatattttagtttatttttaaaagggtttgagtcggataggggttaaataggttttttcgatttggcgggtcggttagacgtgatagtaatgttaaggaggttaagtttttttgtttattttttattttttttttttttatttttggattttttggcgtttttagtatatagaggtttttgagtagttcggttgtaggttttttatttatttagagtttttttttttacgtgtttatttttaattttgta

SEQ ID NO: 28 - DNA, 1920 bp, Artificial Sequence
  chemically treated genomic DNA (Homo sapiens)
tgtagggttggggataggtacgtgagggggagaattttgagtagatagggaatttgtagtcgggttgtttaagggtttttgtgtattgggggcgttaggaggtttagggatggaaaagggggaggtgagaaatggataaagaaatttggtttttttggtattgttgttacgtttggtcggttcgttaagtcgaaggggtttgtttagtttttgttcggtttaaatttttttgggaataagttgggatgttagaaaaaataaaattttataatttttgtttggggaatttaggtcgttggaggtgggtttggtagggtagcgtgattgttttttgggagtggttgttatagtttcgggtgaatcgaggagtttgggttaagtttttattttttttggagagggtagtagtaaggaggtgaggggagttagtttattttttttaattttgtattttttttttatttttttatttttagttcggaagaatcgttggcggcgggagtttggacgagttggcggggaaggggacgtagttatagtattgtttgggagggaggggagaagtttcgtttttagaggggaggggagaagaggagggggtaggagataaggggaggaagaaaggcgaaggtaaggcgaaggggtggagagtgatatgaagagcgagagaaaagagaggatagcggacgagtagattcggtaggggttgaaaaaggttaaggggttggagggagggagaggaaggaggaggggagcgaggagggcggggcgttcggtttttagtcgcgcggttatcgtttgtttagtttggttggatttgagttcggttcgtcgatcgttggtcgaggcgtagttgaagtagttttttagtcgcggcgtttttattttttaattttacggtttttgcggcgcgggcgcgatgtagttggttcggggtgaaggtaaggcgcggggcgcggggcgcggggtattgggagcgaggtattggcgcgggatgttcggcgtaaggtgtagggcgcgggtcgtttttttttcgcgtttttttatttcgttaaagtttttttacgatggtttttatttcggttgggttagtttcgtaattttcgtttgttttttgttttttttttttttttcgagtcgcggggttttcggggcgcgcggattttcgttaggggtcgtgtaggcgcggagttttagtcggtttgttttgggttcgaagaaagttgtggtttggagttagttttttttttacgatttttgggggcgtttttttttttttttgagttcgcgatgggaaggcgtttttattttattttcggggtttttgagattttttggcgaggtggggcggcgcggtaggtgtagggttggggagggtttgatagttttggagagtgttcgattttagttcgtcgtcgttttttaggcggattttttagaggtaggttttagttttcggcgcggggaggcggcgcgttttagaggggcgtagggtgcgcgggggtcgttggtttttcgggtattttttttttgcggttttttcgttttttttcggagttggtgtttgaggtcgttgggattttagtttggcgttttttttcgtttcgagcgaggtaggtgtcgtgggcggtttcggttatttttgtatttcgagcgtttattttgtatttagttttaagtcggagagttttggggatagtcgagagtgttagtggttttatagggagattgagggttttgttttatttcgggcgtcgtgtgggtttgggttgtttatagtatttttgcgttttagtgataggagaagttaagcgcgaggttttttaatagttgcgtgtattttattttttaggtatttggaatttcggcgtttagaacgtgtttttcgggagagtaaaggttgtgtttacggtagtttgg

SEQ ID NO: 29 - DNA, 2225 bp, Artificial Sequence
  chemically treated genomic DNA (Homo sapiens)
atttttttgtaaattaaatttttgttgtttagtttagtgtttggtgtatagtgggggttagatagatatttgttgagtgtatgattagggcgttgtaggtggaggaggtggtggtggggtgggggaggggaatttttttgttgtttttcgttttgtgggaattagttttagaaagaaattttttgtcgttttttttattttattttaattttggatttgttttttgattttttttatttggttttagttttttatttagagttaattttgtttgaaaggtattatgttttgttattaaggttttaaaatagggaaaatagtttttgaagtttttagttcgtaggagatagggtattttagggtataaggttttatcgaggggttggaaaaagagtttagattttaatatttatagaaaggggttttggttgtttagttgtgagtggtttttttttcgttttttagtatatttggaaacgattttatatgtgggcgtcgcgggatgttgggtagtaaggagatgatttagttgaataatgtatttggtttatttttgcgaggggaggagaacgtcgagggataggaattgcgcgttagtaaaagatattttaatttggggtgcgttcgttagttgtttttttaaggtgaaaatttttaagaggcgagatgtaaattttagtggcgtttatattcggaggtgttttttttttaggtcgttttttcgttttatgcgatattttaattttcgtagtttttgtttagcgtgggattaagaatggggagttttattttttttcggttttttagttttttaatttaagataagagggcgcgcgttcgggttgggataggttttagtcgtattttcgtagattgtatttttcgttcgggagcgattcgttttagtagtttttttttcgttttattaacgcggtcgtattgtcggcgtttagaggcgatattttggtaaagataggaattaagttagaaatttaggttttagaagtaaaggttgcggtgttttttggttggaagaaaacggcgggtgggtggaggatgcggtgcgcgggaatttttttacggacgtttgttgttttttgtttattttttaggaaggtgtttttttatttgtatttttttttgtaatttggagttcgttcgcgagtttagttattcgttggttttttttgttcgcgttcgtatattatagatttcgtttatcgtattttattcggttttagagggtttagaggggattttttgaaattaattcgtttgtttggagttagtttcgacgtatatttcgagagtggcgggaggtaaagtagtcggaatgttcgagaaaaaagtgggcgttagaggtttttgttttagcgatttttttatcgtatcgattgagtttcgggattgtagggatttaagtttttatttgtttcggcgttttttttttgtgcgttttgttgtttcggaagtcggatcgagagttatagtgtggttgggcgtaggcgggtcgttcggtttttatttcgaggattcggatttgtatttgtagagtcgttgcgtgggggatgtttttttttttttttcgtttcggcgggttttttcggcgtgttagggtttttgggttttagttggagttggcgtttcggttttatagttttttttagcgtttcggatttgtgcgtttcgtttcgcgttggatttcgtttcggggttttcgtttgttttttagtttaggttaagggtggatgtttagtttttttattttatcgcgtgttttcgggttggtgcgtttagggcgcgggtatcgtagtttcggtcgcgttgacgcgagttttcggtagcgggggtagtttttcgtacggattttagcgttttcgtatttcgtttgaatcggattatatagtagtcgggtttttatcgtgcgtttgggaatagtgagtatcgttttttgtcgttagtcgtggtatcgtattcgggtcgcgcgcgtaggaggggagagttttgtttttcggaggtgtttagtgttagcgttcgcgtttattagaaggtgatttttttaaggaaagttcggtttcgacgagtgcggtgtgggtttttggagatggcggtgaaggaggaggtttttaggaggaagttggggatggggatagtttgttttgtttaaagtttttgaagtttttatttaaattttgcgatgattattattattagattttatggtt

SEQ ID NO: 30 - DNA, 2225 bp, Artificial Sequence
  chemically treated genomic DNA (Homo sapiens)
ggttatggaatttgatagtggtggttatcgtaaagtttgggtgaggattttaggggttttgagtagagtaaattgtttttatttttagtttttttttgggggtttttttttttatcgttatttttaaaggtttatatcgtattcgtcggagtcgggttttttttgaaagggttattttttagtgggcgcggacgttggtattgggtattttcggaagataggattttttttttttgcgcgcgcgattcgggtgcggtgttacgattggcggtagagggcggtgtttattgtttttaagcgtacggtagaaattcggttattgtgtggttcgatttagacgggatgcgaaggcgttgaaattcgtgcgagaggttgttttcgttgtcggggattcgcgttagcgcggtcggagttacggtgttcgcgttttggacgtattagttcgagagtacgcggtggggtgggggagttgggtatttatttttggtttggattaggaggtaggcggggatttcggggcggagtttagcgcggggcggggcgtataggttcgagacgttggaaagagttgtggggtcggagcgttaattttagttggaatttagagattttgatacgtcggaggagttcgtcggggcgaggaaaaaagagggatattttttacgtagcggttttgtaagtgtaagttcgggttttcgaggtgaaaatcgagcggttcgtttgcgtttaattatattgtgattttcgattcggttttcggagtagtagagcgtatagaaaggaggcgtcgagataggtaagggtttagatttttgtagtttcgggatttagtcggtgcggtgggggagtcgttaggataagggtttttgacgtttatttttttttcgggtatttcggttgttttgtttttcgttattttcgagatatgcgtcggggttggttttaagtaggcgagttggttttaggagattttttttgggttttttaggatcgggtagggtacggtaagcggagtttgtggtgtgcgggcgcgggtagagggagttagcgggtagttgagttcgcggacgagttttaaattgtaggggagggtgtaggtagaggggtatttttttgaaaggtgagtaggaaatagtaagcgttcgtggggaaattttcgcgtatcgtattttttatttattcgtcgtttttttttagttaggaggtatcgtagtttttgtttttagagtttgaatttttgatttgatttttgtttttgttaggatgtcgtttttagacgtcgatagtgcggtcgcgttgatggggcgggaagggggttgttggaacgggtcgttttcgggcggggagtgtaatttacgaaaatgcggttgggatttgttttagttcgggcgcgcgtttttttgttttgggttagggggttggaaagtcgaggaggggtaggattttttatttttggttttacgttgagtagaggttgcggggattggggtgtcgtatgagacggaggggcgatttggagagaagatattttcgggtgtggacgttattgggatttgtatttcgttttttggaggtttttattttgggaaagtagttggcgggcgtattttaggttagggtgttttttgttggcgcgtagtttttgtttttcggcgttttttttttttcgtaggagtggattaaatgtattgtttagttgggttatttttttgttatttagtatttcgcggcgtttatatgtggagtcgtttttaggtgtgttgagaggcgaggggaaggttatttatagttggatagttagggtttttttttataggtgttgggatttgggttttttttttagtttttcggtgaagttttgtattttggggtgttttattttttgcgggttgagggttttagagattattttttttattttgagattttggtgataggatatggtgttttttaggtagggttgattttgggtggagaattagggttaagtgaaggaggttagagagtagatttaaagttggagtagggtgggaagggcggtagaggatttttttttggagttggtttttatagaacggggagtagtaggggaattttttttttttattttattattattttttttatttatagcgttttggttatgtatttaatagatgtttgtttagtttttattatgtattaggtattggattgggtagtaggaatttggtttataggaagat

SEQ ID NO: 31 - DNA, 2251 bp, Artificial Sequence
  chemically treated genomic DNA (Homo sapiens)
ttttttagcgtgattgatcgcgatttagaggagaatgggtaggtgtagtgcgagttattgggagacgtgttttttcgttttaagtttttttttaagaattattatattatcgttatcgaagtttttttggatcgagaggcgggggatttttatattttgattgtagtggttcgggatcggggcgagtttgcgttttttattagtaagtcgatttaggtataagtgtcggatgtgaacgataacgcgtcgcgttttagttagtcggtttacgacgtgtatgtgattgaaaataacgtgtttggcgtttatatttacgcggtgagcgttatcgatcgggatgagggcgttaacgtttagtttgtttattttattttcgagtgttagatttagggtatgagcgtttttatttacgtttttattaattttgagaacggttatttgtacgttttgcgttttttcgattatgagtagttgaaggattttagtttttaggtggaagttcgggacgttggtagtttttaggcgttggttggtaacgttattgttaatatttttatagtggattaaaatgataacgtttttgttatcgtggcgtttttattagggcgtaacgggattttagcgcgtgaggtgttgtttcgttcggcggagtcgggttatttgtttattcgcgtggtcgtcgtggacgcggacgacggcgagaacgttcggtttatttatagtatcgtgcgtggtaacgaaatgaatttttttcgtatggattggcgtatcggggagttgcgtatagtacgtcgagtttcggttaagcgcgatttttagcggttttatgagttggtgatcgaggtgcgcgattatgggtagtcgttttttttttttatcgttattttggtggtttagttggtggatggcgtcgtggagttttagggcgggggcgggagcggaggcggagggttaggagagtattagcgttttagtcgttttggcggcggggaaatttcgttagattttatttttatttttattatcgcgttgggttcggtgttttttatttttttgttggttatgatcgtgttggtcgtgcgttgttaaaaagagaagaagtttaatatttatatttgtttggttagcgattgttgtttttgttgttgttgttgcggtggcggaggttcgatttgttgtggtcgttaagttcgggcgcgtaagaagaaatttagtaagttagatattatgttggtgtagagttttaatgtatttagtaattcggtttaggtgtcgatagaggagttcgggggttttggtttttattattataattagaattattgttattaggtatgtttgatttttgagttcgttaagatcgatttgatgttttttaagttttgtagtttttcgcggagtacggatattgagtataatttttgcggggttatcgttatcggttatatcgattagtagtttgatattatttttaacggaagtattttgtttaacgaggtaaggttgaagcgaaaggattattattttttattttttttattagaaagttttttttagttcggtttttgtatttttggtgtattgtatttatttttaggatattagtttatgtgtatcgttgtgggagtagagatgggcggttatttttttttattttttcgtgtgtaatttaattttcgcgttgttttatttttttatatttatttttatttcgtttttttggtattttgttattttggagtttttttttttgtttttttattttgttagttttttttttttttagtaatttgggtatgaagggaaattgcgtgaagggagagggaaatgtggaggagggatttattttttagtattggtaaaggttttttttttttgcgtttgttttaggtattaataaagttggttttattttgttttgtttaacgatgtttttagtcgcgtgtataagtaagttatagattgtttaattttatatagttgtttaatttcgaatttatgttttagtgaataagttattagattttttttttttgaattcgggttgtaaaaaaagtttttagttcggttttggatagtatttatagacgtttttgaagtcgagcgtttatatagtgtgaatttgaatgaagttgcgttggtataaatttttgttaagagtaaattaacgaaaggtttaaataattgttgttttaaatatatttttttagttaataattatttttttgttattgttttggataaattacgt

SEQ ID NO: 32 - DNA, 2251 bp, Artificial Sequence
  chemically treated genomic DNA (Homo sapiens)
gcgtgatttatttaaaatagtggtaagaaggtgattattagttaaaaagatatatttaagataataattgtttaagtttttcgttagtttatttttaataggggtttgtgttaacgtagttttatttaaatttatattgtgtgggcgttcggttttaagagcgtttgtaaatgttgtttagagtcgaattgaaggttttttttgtaattcgagtttagaggagaaggatttggtaatttgtttattaaaatatgaattcgaggttagataattgtgtaaagttaaataatttatagtttatttgtatacgcgattaaaagtatcgttaaataaagtaaaatagagttaattttattaatgtttgggatagacgtaaagaaaaaagatttttgttagtgttagaaagtaagttttttttttatatttttttttttttttacgtagtttttttttatgtttaggttattgagaagggaaaggattgataggatggaagagtaaaggagggagttttaaggtggtaaagtattaaggggacggaatgaaaataaatgtgaaagggtggaataacgcgaaagttaggttatatacgaaggagtgggagaaggtgatcgtttatttttgtttttataacgatatatataagttaatattttaaaaatagatatagtgtattagagatataagggtcgggttagaggaggttttttgatggaggagatgagagatggtggttttttcgttttagttttatttcgttggataaaatgttttcgttggagatgatattaggttgttggtcggtgtaatcggtgacgatggtttcgtaggggttgtgtttagtgttcgtatttcgcgaagggttgtagggtttaagaaatattaggtcggttttggcggatttaggggttaggtatatttgatagtagtaattttggttgtggtggtgggagttaaagttttcggatttttttatcggtatttgggtcgggttattgggtatattggagttttgtattagtatgatgtttgatttgttgagtttttttttgcgcgttcgggtttggcggttatagtaggtcgaattttcgttatcgtagtagtagtagtagaggtagtaatcgttggttagataagtatagatgttgagttttttttttttttggtaacgtacggttagtacgattatggttagtaggaagatgaaggatatcgagtttaacgcgatgatgaggatgagggtgaggtttagcgaggttttttcgtcgttagagcgattggggcgttggtgtttttttgatttttcgttttcgttttcgttttcgttttggggttttacggcgttatttattagttgaattattagggtggcggtggaggaaaggggcggttgtttatggtcgcgtatttcgattattagtttataaggtcgttgggggtcgcgtttggtcgggattcggcgtgttgtgcgtagtttttcggtgcgttagtttatgcgaaagaggtttatttcgttgttacgtacgatgttgtaagtgagtcgggcgttttcgtcgtcgttcgcgtttacggcggttacgcgggtgagtaggtaattcggtttcgtcgagcggggtagtattttacgcgttggagtttcgttgcgttttggtagaggcgttacgatggtaggggcgttgttattttgatttattatgaggatgttgatagtggcgttattagttagcgtttgggggttgttagcgtttcgggtttttatttgaaaattgaagttttttagttgtttatagtcgaaggagcgtagggcgtataagtagtcgtttttagagttgatagaaacgtaggtgaagacgtttatgttttggatttggtattcgaggatagagtaggtaagttgggcgttggcgtttttatttcggtcggtggcgtttatcgcgtagatgtaggcgttaggtacgttgtttttagttatatatacgtcgtagatcggttggttgaaacgcggcgcgttgtcgtttatattcgatatttgtatttggatcgatttattggtggagagcgtaggttcgtttcggtttcgagttattatagttagggtgtaggagtttttcgtttttcggtttaggggggtttcggtaacgatggtgtagtaatttttaaaggaagatttgaggcggaaaggtacgttttttagtagttcgtattgtatttgtttatttttttttgagtcgcggttagttacgttgaaaag

SEQ ID NO: 33 - DNA, 2553 bp, Artificial Sequence
  chemically treated genomic DNA (Homo sapiens)
ttggttatttttgtttttttttagatttttagagtttttagtgtagttatagaggatgttgttggttttagttttaagaagacgtcgttttttttagagggttaagtaagtgggaatttttttttttatttgttttgggttttaggtagggtttttggtgtaaggtttggggttggaagtcgatttatttaggtttaggttttggggtagaattgaaattttttggttattgtcggttgtagtttgggagtaggttattgttaaagttgtgggtttttttaggatagtttttttatgaggtcggttttttatttgttgtttttttatatttggtggttagggatgtggttttgggtagaacgatgattttttatttttgttattatggaagttatcgttgttttttagtttagttagttatttgggttgtagagtattttttttatgtttttcgggtgtttttttttttttttgttttagtttggttttgttttattttgtttttagggaggggtattttggagtggggttagggtatggttttttttcgagggagtttttttttggttgtttttagggtagttttgtatagttttagtatttggcgtattttttttgatattttttttagggatagttaggtattttgtgtggggtatttaagagagttaggttcgttagtttttagtttttgttagaatgtaggtttgaggggtgaggggcggggtaggggtagggataggaatttcggcgtgttttttattcgtaaaggtttattgaggtttcgagttttagttattgagttattaagttagtttgggttaggtttgggtgttttgtttgtaatggaggtagagacggggtttcggggtagttttgaggatgttgggtgtatagcgggggtttcgtcggtaggaattatttatgtttttttttgggttaagttttgtggatgtttagtttggggtcgcggggagttggtaggttagtggtagatattggtgggtagatttagtgtttggtagaataggtattaaggaagtggtgatcggagggaagttaagtgtatttaaattttcgggtgagttattatcgtcgggttttttatagttgttgaaagtgagtaatagtgatgaaggtttgtgagtttttgcgtgagcgagtgaatggattagtagtagtttttaggttgtggaagagcgtttttttttcgggatggggatatttggttatagtaatttttaattttttatttatttatcgtttattgtagaggtatgcgggggttttgttttttgtaggtaggagtgaggggtatttttgtgatgtggtatttttgtgatcgaggttatgtgtgatcggtgtaagggtaggaagcgagttattggtttgtattaggcgtgggggtttttgcgagggtaggatttaaagtcggtttggtttttcggttgtagtatttttttttttttcgaattaggttagagttttgggacgggaggtgttttgtagattattttttttattaattttcgtttttcgttttattttcgcggtgattcggtgaattgtcggttttttgttgtgtatcgagtggggtagtgattttgacgtggcgttttttgtcgtttttgttatcgttattattttcggtggtttagttttcgtattttttatttttatggaggaatgtattaggtttttttttttggatgtattttttatttatatgtttttaaattttggtattttttgttttttttttatttttatttttttttttaggtttttagataaaggggaagtggttggatttttttaaagggatagtgttttattagtttattgttgaatttttttttttaattttagttttttagttatagttaattagtattagtagatagtttatgagtgatatttatgtaggttttaggttgtggagagttttttgggtaggaaatagtttttaaggttttttattttatttaggttttagttttttttatttgttttttttttagattgtggttttttggagtttggtttttttgtttttgtgtgatcgatatatagtatttaaatagtggtagagcgggacggattttttagtttgttttttgtgtgggtttgtattttgatttagatatgtttttttatagtaggatttaggggggtatatgtgtgtttgcgggtttattggggtattcgtatttggtttattttattttttagagagagggttttgttgtgttatttagttggagtgtagtggtgtaattatagtatattgtagtttttaatttttgggtttaagcgattttttttttttagtttttttagtagttgggagtataggatttattgtattttggttaattttttaataattttttaagagatggggttttattgtgttgtttaggttggttttaaatttttggttttaagtgatttttttattttcgttttttgaagtgttgagattataggtatgagttattatgtttattttagattgatatttttatatttgtttattttggttgggtaggg

SEQ ID NO: 34 - DNA, 2553 bp, Artificial Sequence
  chemically treated genomic DNA (Homo sapiens)
ttttgtttagttaggatgaataaatatagaaatgttagtttgggatgggtatggtggtttatgtttgtaattttagtattttaggaggcgaaggtgggaggattatttgaggttagaggtttgaggttagtttgggtaatatagtaagattttattttttaaaaaattattaaaaaattagttaggatatagtgggttttgtatttttagttattagggaggttggggagggaggatcgtttgagtttaggagttgaaggttgtagtgtgttatgattatattattgtattttagttgggtgatatagtaagattttttttttaaaaaataaaataaattaaatgcgggtgttttagtgaattcgtaggtatatatgtgtttttttgggttttgttgtgggggggtatgtttgggttagggtatagatttatatagagaataggttagggggttcgtttcgttttgttattgtttgggtgttatgtgtcggttatatagggatagaagaattaggttttaaagggttataatttaggagagaggtaggtaggaaagattgggatttggatgagatgagggattttaagggttgttttttatttaggaaattttttatagtttggggtttgtatgggtattatttatgggttgtttgttaatgttaattaattgtaattagggaattggggttgaggaggggagtttagtagtaagttggtgggatattgtttttttaagaggatttagttattttttttttgtttgggagtttaggggaaggggtgggagtaaagggggagtagaaaatgttagggtttggaagtatgtgggtgaggggtgtatttaggaagggaggtttggtgtatttttttatgggggtggggaatgcggaggttgggttatcggaggtggtggcggtggtaggggcggtaggagacgttacgttagggttattgttttattcggtgtatagtagggggtcggtagtttatcggattatcgcgggggtggggcggaggacggaagttggtgaggggggtggtttatagggtatttttcgttttagggttttaatttaattcgaaagggaaaggagtgttgtagtcgggaggttaggtcgattttgggttttgttttcgtagaagtttttacgtttggtgtagattaatgattcgttttttgtttttatatcgattatatatgatttcggttataggggtgttatattataggagtgttttttatttttgtttgtaggaagtagggttttcgtatatttttgtagtgggcggtgggtgggtgggggattaggaattgttgtaattaagtgtttttatttcggggagggaacgtttttttataatttggaaattgttattggtttatttattcgtttacgtagaaatttataaatttttattattgttgtttatttttagtagttgtgaaagattcggcggtgatgatttattcgagggtttgagtgtatttggttttttttcggttattatttttttgatgtttgttttattagatattaggtttgtttattagtgtttgttattgatttgttagtttttcgcggttttaggttgggtatttataaagtttggtttaggagagagtataagtgatttttgtcggcgaggttttcgttgtgtatttagtatttttagaattgtttcgagatttcgtttttgtttttattgtagatagggtatttaggtttggtttaggttgatttggtggtttagtggttggggttcggggttttagtgaatttttgcggatggagagtacgtcggagtttttgtttttgtttttgtttcgttttttattttttaggtttgtattttggtaggagttagaggttgacgggtttggtttttttgagtgttttatatagagtgtttgattgtttttaagaaggatgttaagggaggtgcgttaggtattgaggttgtgtagagttgttttggggatagttagagaggaattttttcgggggagagttatgttttggttttattttagggtatttttttttgagagtagggtaggataaagttaggttggggtaggagaagggggaggtattcggagggtatgaaaggggtgttttgtagtttaggtggttggttgggttgggagatagcggtggtttttataatgataggagtggagaattatcgttttatttagggttatatttttggttattaggtgtgaagaaatagtaggtggaggatcggttttatggggagattgttttggaaggatttatagttttggtagtggtttgtttttaggttgtagtcgatagtaattaaggagttttagttttgttttagagtttggatttaggtgggtcggtttttagttttaggttttatattaggggttttgtttggagtttaggataagtagggagggggatttttatttatttagttttttggaggaagcggcgtttttttggggttgaagttaatagtattttttgtggttatattgggggttttggaggtttaagggagggtaggggtggttag

SEQ ID NO: 35 - DNA, 2001 bp, Artificial Sequence
  chemically treated genomic DNA (Homo sapiens)
ggtaaaagtttgtttggattttttggttattagaaatatgagtatggtggtggtttttagttttttatttatgtttgggtttaagagattgggagtttaggtttattgattttttgagaaagattaagattttgtattttagaaagaggtttggggatttttgttttgcgtaagggtagaaggattagttgtttttttgagtattttaattcggaatttcggttcgaagtcgagataggagattggatgcgaggtttttttagagttggttttttttaaataatttttaaaatttttagattttaggggtacgtcgaaattttttaaagtagtttaaagaatataacgagagttttaatattttaggtggcggcgcgttggttttttggagcggggcgggacgcggtcgcgcggatttacgtgtataatcgcgcgggacggggttacgcggatttacgtgtataatcgcgggattttagcgttagcgggattttagcgttagcgggattttagcgttagcgggattttagcgttagcgggattttagcgttagcgggattttagcgttagcgggattttagcgttagcgggtttgtggtttagtggagcgagtggagcgttggcgatttgagcggagattgcgttttggacgttttagtttagacgttaagttatagttcgcgtagtagtagtaaaggggaaggggtaggagtcgggtatagttggattcggaggtcgtgatttaggggaaagcgtgggcggtcgatttagggtagttgcggcggcgaggtaggtgggttttttgttttttggagtcgtttttttttatatttgttttcggcgtttttagtagtttttattttggtttttcgcggttattgcgggattcggcgttgtcgttagtttagtggggagtgaattagcgttttttttcgttttcggttttttcgacggtacgaggaatttttgttttgttttatagattttcggttttcgtcgagtgcggtattggagtttgtttcgttagggttttggaattagagaaagtcgttttttggttatttgaagcgtcggatttttatagtgttttttagtttgggcgggagcggcggttgcgtcgttgaaggttggggtttttggtgcgaaagggaggtagttgtagttttagttttattttagaagcggttttcgtatcgttgcggtgggcgttttcgggtttcgatttcgttagcgtcgcggggtagaggtatttggagttcgtagggtttagatttgggttggaaaagtttcgttgattgtaggtaagcgttcgggaggggcggttaggcgaagtttcggcgttttattatatattttcgggttttatgttagttgtattcgcggtattgggtaggaaatggtagggttgaggtcgattttaggagtataagggagttttttattttttgtttatatttgttatttttagttttgtaatttattttagatatatagaaagtaagtaggattggtggggagacggagtttaataggaatattttttagtagtgagtaggggttgtatgggacgcgggaggagtttagaggaggcgcggagagtgttcgaggttgggtgagtgtttagaggggagatagttgaatcgggtttaagaggtgtttagtgggtgtttgttgaatgaatgagtgatgggttttgaagtttgagtgtattgaaagagggggtgtgtaaaaagggttttttttattatataggatatagtatatgtaaattttttttttgtggaaaagttagataggttaaaaaggttataaataaattagtcgggtatggtggtgcgcgtttgtagttttagttattagggaggttgagttaggggaatcgtttgaattcgggaggcggagattgtagtgagttaagatcgcgttattgtattttagtttggaaatagagcgagatttcgtttcggaaaaaaaaaaaaaaagttataaatcgtgtgtggg

SEQ ID NO: 36 - DNA, 2001 bp, Artificial Sequence
  chemically treated genomic DNA (Homo sapiens)
tttatatacggtttgtaatttttttttttttttttcgagacggagtttcgttttgtttttaggttggagtgtagtggcgcgattttggtttattgtaattttcgtttttcgggtttaagcgatttttttggtttagtttttttagtagttgggattatagacgcgtattattatgttcggttaatttgtttgtaatttttttaatttgtttggtttttttatagggagaggatttgtatatgttgtgttttgtgtgatgaaaggagttttttttatatatttttttttttaatgtatttagattttaaagtttattatttatttatttaataaatatttattaagtattttttgaattcggtttaattattttttttttaggtatttatttaatttcgggtatttttcgcgttttttttgagtttttttcgcgttttatatagtttttgtttattgttggaaaatatttttgttaagtttcgtttttttattagttttgtttgttttttgtgtgtttgggataggttgtaaaattggaggtgataaatgtgggtaggaaatggagggtttttttatatttttagggtcggttttagttttgttattttttgtttaatatcgcggatgtaattggtatgggattcggaagtgtgtggtaaagcgtcggggtttcgtttggtcgtttttttcggacgtttgtttgtagttagcgaagtttttttaatttaggtttgggttttgcgagttttaggtgtttttgtttcgcggcgttggcgaagtcgaagttcgagaacgtttatcgtagcgatgcgaaggtcgtttttggggtggggttgaggttgtagttgtttttttttcgtattaaggattttaatttttagcgacgtagtcgtcgttttcgtttaggttgggaggtattgtagggattcgacgttttaggtggttaaagagcgattttttttgattttagggttttggcggggtaggttttagtatcgtattcggcggaggtcgaaggtttgtggggtaggataggagtttttcgtgtcgtcggaagggtcgaggacgaaggagggcgttaatttattttttattgggttggcggtaacgtcgaatttcgtagtgatcgcggagggttaaggtgaaaattgttgggggcgtcgagggtaggtgtggggaggggcggttttagggagtaaggagtttatttgtttcgtcgtcgtagttgttttgggtcgatcgtttacgtttttttttgggttacgattttcggatttaattgtgttcggtttttgtttttttttttttgttgttgttgcgcgggttgtaatttgacgtttaggttggggcgtttagggcgtagttttcgtttaggtcgttagcgttttattcgttttattgggttatagattcgttggcgttggggtttcgttggcgttggggtttcgttggcgttggggtttcgttggcgttggggtttcgttggcgttggggtttcgttggcgttggggtttcgttggcgttggggtttcgcggttgtgtacgtgagttcgcgtggtttcgtttcgcgcggttgtgtacgtgagttcgcgcggtcgcgtttcgtttcgttttagggagttagcgcgtcgttatttgggatgttaggattttcgttgtgttttttggattgttttgggggatttcggcgtatttttaggatttaggagttttggaagttgtttgagagaaattagttttgggagggtttcgtatttagttttttgtttcggtttcggatcggggtttcgggttaaggtgtttagaggaatagttgatttttttatttttgcgtagggtagagatttttaaatttttttttaaaatgtagggttttagttttttttagggagttagtgaatttagatttttagttttttgagtttaagtatgaatagggaattggggattattattatgtttatatttttggtggttaggaagtttaggtaggtttttgtt

SEQ ID NO: 37 - DNA, 219909 bp, Artificial Sequence
  chemically treated genomic DNA (Homo sapiens)
cgttattcgagttgtaaagggcggttttttgtgtttgtttcgttgtatcgatatatcgagttgcgtacggtgtttagcgtagggagaataaatgattatttgtttaacgcgtttatttataggtgaggaaattaaggttttaatttaatcgacgtattttgtttttttgattattagaaaagtagtaggataggtgttttgtttcgttttatttcggtttattaagtcggtatttcggtttcgattttcggttgtgttcggcgtcgtcgcggtgttcggcgtcgtcgtttcgttcggcggggtcgttcggagcgttcgtattttcgttcgtttttatttggtcgggttcgtttcgttcggattcgggattgggaagtgcggcgattttcggaattagttattggcgttagcgcggggagttgggggtgtagagttgcgggcgcggcgggttacgtaggcggtttttattttcggtttggtttggtttggtttggtttgcgttgtcgcgcgggggcgtttttttttaggttcggcgttcgttagtttcgtttcgttaggtgtagcgtagcgtaggggtgggcgggggtggggttcggcgcgtacgtttacggggcggggagggggcgggttaggggcgggattatagtcggttgggtcggggttttatgcgtattttcggggaggggcggggcgggggcggggtcggggcggggttcggtcggtgtattttagacggcgggtcgtttttttttttcgtttttttattatcggtttaggattagcgttttgggagcgcgcgtttcgttgtttcgtcgttatatttttttgggagcggcggttacggaggtattatgaagaagttttatttaggtgggtttcgcgttcggggtggggaggggtcggtgtttcgggattagcgttgtttatttgagtgtttgcggtcgggagtggcgaggcgttttcggagttgagcgagttttcgcggcgggtatattgtaggtcgagttttttttaggatagggtcgttgtcgggtcgttttcgatttgagtcgatcgttttttgcgttgtttttagtttttgttcgagtgtcggaggggttgttttgggggacgttttttttttttcgttttttgtattttcgtaggaatcgttgattttttaggtcggtcgggtgttttgggtttttgtgcgtttgtgtgggtgaatggggtcggggttaggtggaggggtgtttttgggtttagtttttagggttggtggtttaggtcgtagtatttttttttcggatttttttcggttttttttttatttagtggggtacgggacggtttttagatgggatcgtttagtagcgtttaaatttggcgattcgggtttacgttttgcgtttaggacgtcgttcgcggttgatatttttattttattttagtagggttcgttttaagtaggcgaagggggtttgatttgggttttattatgagtcggtttaggagtttttattttataagaggttttcgttttggtattttgaagttttattttatagatgggtatatcgaggttataagggtaggttaagagaaatttagatttttattatttgtttttttttttttttttttttttttttgtggttttttttaaaggatttaggtaggtaggattttttgttttttttagtttttaaattataaatagcgtttttttttttaaatttagaaatcgtttgtttaatgttttttttttaatttatttagatagaaaggtatttgttaaggatttatgaattaatttttattgataggagaatagaattatgggttttagttggaggtgaaggagttatcggggttatttttttgtttttgggttattgtcggttttttttggttttttatatttaggaattaaaatgagtgataaagtattttgttttaaagaggattatttagaattttttcgaaaatatttttttgggttagtagtttagaattttaatttttattcggttgttgcgaataagatggttttttacgtattcggagtatagttttgttaggagcgtgggtgggttggtgtgttggtgggcgggagcgggtttttaggtggtatatgtttggttttggtatcggggttttttttttaatatgttttaaatatttgagattgttgtggggatcgcgcggtgtatggttttttttaggggatttttagttcgtttagggagggttttttgtttttggttttttatattttattttttattggtgggtttagatagtgggggtgatcggggtttttttaggtcgtgggttttgggttttttttgcggagatttttttgtatagatgtcggaagggttttgaggtaggtttggagtttttgtatttgcggtttattgggaggtggggagattattatttgtttttttttttttttttttatatatatttattttattttttattgggttttttttttttttttttttttaaaaaaaaggatagaattttttgtagtaggtggaagtagagtttgtggagtgagtaggaattaatttttgtatagtagtttcggtgtttttttgtgtttatttaaaggggtaggtttttttgaggatgggggaagggagggtttagattatttttggtttgttttttgtttggtagtggtttaaggtgtgttgggttattgtgttgtagttgtatggagtgggattggagggggttgatggtgggggtggttttttgtttttattttgagtgttttggagttgttttggtattagttttttttcgggtacgggtattcgtaggagttaggttgattttttaataagttatcgatattatgaaattaaggaaagtagtaaaagatgttaaaaattttttaaggttttgataatttaaggataataggaaggtttttatttttttatttagattgtgcgggattattgtttttagatttgtatgtgggttttagaataaacggaatgattataatgttgttttcggtagatttggtttgaatattcgtgagtttttgaaaaggagaaagattttagaaggatgtgttggggtaattttaagtatcgtgggtttatagatagttatcgaagatattttatgtgttgggtatatatggttaagtttgagtgggtatagaaatggtaatgagatatagtttttgtttgtagagaatttatatttttatcgggagttaggatgagggcgagatattagtttattaatattttttttttttgagtagtttagtttttaaatattataggaatgtttcggaggttttaggtggaggtgagattgagttgggttttgaggaaggagaagttttgagtagtggagaataaaaagggatttggttaggtgcgtttgaagttttagttatttaggaggttgagatacgaggatcgtttgagtttaggaggttatttaggaggttgagatacgaggatcgtttgagtttaggaggttatttaggaggttgagataggaggatcgtttgaagttaggagtttaaggttgtagttttgtgatagcgtttggaaatagatacggtattttagtttgggtggcgttatgagattttatttgtaagaaggttttttttaatgcggaaggtagtaagggtttatatagggtagttgtaggatttagggggatattggggataggttttttttggtagttttattgttgttttaggttttttcgattgttttattcggttttttaatggggtggaggtagtggtagtttataggtagtgtggtttagtggttatatttgggggtttagagtcgttagttttttgggattaaattttattaggttgcgtttttttttgtggtataaggtttttattttatgtattttatttgttttatttgtttttttgtgtgtgtggtgttttttaattttatttatttatttatttttgagacggagttttattttgttttttaggttggagtgtaatggtatgattttagtttattgtaattttcgttttttaggtttaagtgatttttttgttttagttttttgagtggttgggattgtaggaacgtgttattgcgtttagttaatttttatatttttattagagatggggttttattatgttggttaggttgatttcgaatttttgatttcgtgatttgtttgttttggttttttaaagtgttgtgattataggtatgagttattacgtttagtttgttttatttgttaaatgggatagtgttatgttgttgtaaaggttaaacgagtttatatttgaaaaagttgagaaatgtttgttttgtaatttgttagttgttgttatgattatgattgttattgataggaggatggagaaggttggggttacgttattgttaggacgttttagaagtttttatgatttttttttattgtggttagagtatggtgtagggttttttttttagttttttagtattggagttagttgtattgtattcgttttggttttttaggttttgagttttgggattttttttgtatattaggttatatggaatttgtcgttatttttaggtttttttggaaattttttgtgggtggtagcggtaggaggatttattcgaggtcgatgagttatagaagcgggattgaggttgcgttatatttttattggtatttgggaattattttggagattttttttttattttttatttttttgagatggagttttgttttgttgtttaggttggagtgtagtggtacgatttcggtttattgtaatttttgttttttaggtttaagtaatttttatgttttagttttttgagtagttgggattataggtatgtgttatcgtgtttagttaatttttgtattttttagtagagatggggttttattatattggttaggttggtttcgaatttcggattttaggtgatttattcgttttagttttttaaagtgttgggattataggtatgagttatcgtgtttagttattttggagtttttttgtggtttttaggagatttttgaaggggtattagttacgattaaaaagttttatgttgtcgtgatttttgagttttgggtagggagggaggttgtatttatataggaagtagtttttgtcgtgatttagtgtgttggttcgtcgtggtggatagggttgtatttttatttagcgtttcgggagttgatttacgggaagggtaaggaattgtatttttagagaatatttttttagttagttaattcggtgataggcgagcgtgggaagggtataagtatagggtttttttttttttttttttagtttcgttttcgcgtttgttttcgttgttttttgtttttttacgtttaagtttgtttgttttggcgtatttaggggatttggattggagagaaaaagttatttcgtacggttagtttgtggttttgtttgatttgtgtttttcgtcgaggttttttagttgtgagatagttggttgagtttaagttttggggttagttttttttttagtttgttgtaaaggtagaaaggtatgtttaggtaggggttatttgttttgttcgtttacgttagatcgtaggtatttgttcgttagattttttcggtttgtttagagggattttgatagtcgagggtaatgtatttggtagcggagtattgcgtttgcgatagtttattttttttttggaattattttttataagtgtgattagtttaagttaggataggtatagggggatttaggattgttatttaggggtagtggtttggaatttaggtttaggtgatatgggagttaattttttgtttggagattttaggtgggtgtttgtagaggatattttatttgaggatttatggaaggggatattttttattttttatttggtttttgggttgtttttttttgatatttttttgttattttaggtagttttgatagttttatgtgattgggatttagaggtggtttttgttttcgttttagtgtttgtttataggtagtgttgcgtgggttttgaagtttgtttaagatggatttgataaggggagtttagtatatattagtgtaggttcggttagggggtgatgatggtagtttttgggtagatttagttggttttagggtaggaggggttttagagagaggttttaggtttttaggggtgtgaatttttggggtgaggcgggaagtgacgcgttgggtttttgcgtttttgtttgttggagttattattttggaaatattttagttttaggcggttgttagggatttatggggattagtgggtgttaatttttgggtgaagttttcggggtttgtatatagtatatagcgttgtggttttatggtttattttgttgtgtgaagtggtttagttttcgggagagtttttagttaggtaggtttgacggtaattgttaggttatggtgatttggaatcgttgattaaagggagttagttttggtgggtggagggatttggtgggtagttatcgtgatgttaggtatggggatcgtgtgttatttaggtttgtgggtgtcgagtttttgtgggagtagtgaagtgttttcgtggtcgatgggttggttatttttgttttttttttgatgtgatagttgtgtttgggtttcgggaaatttgttaggaggtttggtattggtttgttttattggagcggttttgttgagttgtgagttgttcgtttttttgaggtttttagtttattttaattttttatgtggatttggttatttattttagaagcgtttgtcgggcgttgttgagtgttaggttttgtttgtttttttttttgtacgttggaggttttgggtattagttttgtagggtggtttggttttgggtttttagggtagagtatggtattttttgtttttagtttagtttttttttgttttatttttttgattttattttgggtatgggtttatttgtagtttttgtgaagggagatattgagttgttgttggtagaggaggggcggtttttgggtattgtttgttaatggtttttcggtagttttgtgatagttgagttttgtttttagtttaatttgatttggttttttaaagtatgattgttggtagtttgaaaatttttaggataggaaataggagtggcgtagggaatgtaagatgattttagttttaagttattgggcggtttttagatttaggttgtttgttgtttttggtaggaatttaagtcgttggttatttttagagcggtgttggttcggggtttttagtggtttttgtgtttgggtgagaggaattttggatggttattttgttttgagtgtgtgggtttttagaagtgttgggttagggggtacggagggttagaaagttttttttggagcgttggattttttcgttgatttttattttatttcggtttggggttttagagaaggggtttaggtaggagtgttatttttttttaatggggatgtggttttagtttttgtttaggtgggtgtattgtttttttttcggttttttttaggttgtttaaatgatttgtgacgaggtttgcgttatggtcggggttttttgttttttttagcgttgtatttgggaattaggggttgggtttcggaagtcgaggatgtttttgaatgttatgtttgggtatttgttttggttaggcgaggcgtgttggggtagcggttgagatgggagtagtagtattgtttgttaggtttgagatgggtttcgggtgagtgtggttattaggaagggttgggtagagtaggcgggtgggtcgtttttggggttttgtttcgtagattaatttgattcgtattttggggtcggggtttttttttatagtttttttatgaattatggtttttgtttttattttaaattagattttagaagaggaataatgtttatgtaatttaagttagttggaagtgggttatatttaatttttgttattttttagtttgttaaggatttgattaatttaatttagagggatttggagggttgtttgtaaaatttattaataatagggaattttagttttgtagttatagggtttatagaggtgtcgggttgtcgggttattgttgggaggtgagtcggtggcgtagatattatggaggtatcggtagtggaagagttgtaagtgtatatagaggtcggtatcgaggggcggggaggaggaggtggtggatttttcgttagtgttggtattatgttgtttttagtattagagatttaaggtgtggttgattttggttggggcgatgagttattggatagtagagtttttttggtagttgggggttaacgttttaattgtcgggattttgtattatgtcgttttttttttttgttttgtttggtttggtttggtttggtttttgagacggagttttattttgttatttaggttggagtgtggtggtttaattttggtttattgtaatttttgttttttgggtttaagtaatttttttgttttagttttttgaatagttgggattataggtacgcgttattatgtttggttaatttttgtatttttagtagagatggggtttcgttatgttggtcgggttggttttaaatttttgattttaggtgatttatttgtttcggttttttaaagtgttgggattataggtatgagttatcgcgtttagtttgtatttatgtttttttttttttttttttgagatggagtttcgtttttgttgtttaggttggagtgtaaaggcgcgattttagtttattgtaatttttatttttcgggtttaagcgatttttttgttttagttttttaagtagttgggattataggtttgcgttattatgttcggttaattttgtatttttagtatagacggggtgtttttatgttggttaggttggtttcgaattttcgattttaggtgattcgttcgttttggttttttaaagtgttgggattataggcgtgagttatcgtattcggtttatgttttttattattattatttaattttttaaggaaagtaatttaaattgtatattgtatttttttttttttttttgttttttgttgttagttttttgtattatttattgttaaataatatgaataggaaattgaaaggaaaattttaataattattggttgtagtattttttttgtgttttatttagtgtttgtttttttaggaatatgatatagggtttgatttaattatgaaaggcgtatatttttagagttttatattttttatagaatgaatgttgaattttgttttttttatttgaaattagattttaggtatggattttatgattattattataatggttttttagagtggatattgtattttgtagggaattattttttttttagttgttggtgtggacgtttttttttgatggtgtgggtttgggtttttgaagggtggtgttttgagtaaagatgttatagtagttatgtttatagttttgggtttggggttaggtggagattggttttaattttagagtttgttgttttaaaataaatttttttttttttttttttgagatggagtttcgttttgttgtttaggttggagtgtagtggcgcgattttcgtttattgtaagtttcgtttttcgggtttatattatttttttgttttagtatttcgtatagttgggattataggtattcgtttttacgttcggttaattttttgtatttttttagtagaggcggggttttattatgttagttaggatggttttaattttttgatttcgtgatttattcgttttagtttttaaagtgttgggataaaataaatttttagggtcgggagcggtggtttatatttgtaattttagtattttgagaggtcgaggcgggtagattataaggttagaagatcgagattatggtgaaatttcgtttttattaaaaatataaaaaattagttgggtgtagtggcgggcgtttgtagttttagttattcgggaggttgaggtaggagaatggtatgaattcggaaggcggagtttgtagtgagtcgagattgcgttagtgtattttagtttgggcgatagagtgagattttgttttataaataaataaataaataaataaataaataaatttttatatttatttgtattatttattattattattattaaatagggttttgttgtgttgtttaggttggagtgtagtggcgtgattatgattttttagtttcgattttttagttttaattggttttttttttttagttttttgagtagttgggattataggtgtgcgttgtatgtttggttaattttttttttttttttttttttgagatagagttttattttgttgtttaggttggagtgtcgtggtgtaatttcggtttattgtaattttcggtttttggattaaagtaatttttttgttttagttttttgaatagttgcgattataggtatgtgtcgttatatttggttaatttttgtatttttagtagggacggggttttattatgttggttaggttggttttaaatttttgatttcgtgatttatttgttttggttttttaaagtgttgggattataggtgggagttatcgcgtttggtatgtttggttaatttttaaaaaatttttgtagtagtcgggcgcggtggtttatgtttgtaattttagtattttgggaggttaaggaggtcgggagttcgagattagtttgattaatatggagaaattttgtttttattaaaattataaaattagttgggtatggtggtatatgtttgtaattttagttatttaggaggttgaggtaggagaattgtttgaatttaggaggcgggggttgtagtgagttgagatcgtgttacggtattttagtttgggtaaagagagtgaaatttcgttttaaaaaatttttgtttttgtttttgtagcgatagggttttgttttgttgttgtttaggttggtattgaatttttagttttaagcgatttttttgttttagttttttaaagcgttgggagtataggcgtgagttattgtgtttggtttttatttgttttggttgtttttttttgttttaggtaattatatatttttttaggtaattaagaaaagattgcgtatgatgagttttttttttggtatttttgggattgtttttaaaattagataagtgtttttattttgatattttattaagattttaatgaatagaatgtcgtttgtttttagtttgttggtttttttgcgaaggtttagggtttttttgtttgaaaagttatttttttgtcgaggtttttgatttttttttattacggtagttatgtcgagggtttatagagttattttttttttatttttttttcggttttttaagacgtatttgtattttcggagatgtttttttgtttttttgggttattttttttggtcgttatttattttgttgatttattatttgtgtaatagttttttttggaatttttaggtttttgttatttattttttgtagttttcgttttgttttttttgttttagtttttttttttattatttttttatttgttggtttttatttttgtttatggtatatttttgtgttatattttgatggttggataaaggttgagtgaaacgtatttatttttttggtgattggggtgtttattaattagaagggatttaaggttggcgtagttttttttcgtattttggggtatcgttttgtggtttttttttgttggagtttgtagttttttgtttttttttttttaaattttttgagatggagtttcgttttgtcgtttaggttggagtgtagtggtgagattttagtttattgtaattttcgtttttcgggtttaattaatttttttgttttagttttttaagtagttgggattataggcgttcgttattatgtttggttaattttggtatttttagtagagacggggtttttttatattggtcgggttggtttcgaatttttgattttaggtgataggttcgcgtcggttttttaaagtgttgagattacgggtatgagttattaggttcggtcgttgagattatttttataagttattaggtttggttgtagttggtagtttttgattattggtttcgttttacgtgatttgtgattttttttttggttttttggttttgttttgtttatttgtttattttttttatgtatgcggtttgtttatagggtatgtaatggggtttaattaggaaatggaaatcgtttgagtatttatttatttatttatttatttatttatttatttattttttttaagataaggttttattttgttacgtaagttgaagtgtagtggtgtgattatagtttatggtagttttgaatttttgagtttaagcgattttttttttttagttttttaagtagttcggattataggtgtatattatatgtttgtttaatttttttttttatttttgtagagatagggttttgttttgttgtttaggttggttttgaatttttaattttaagtaatttttttgttttagttttttaaagtattggagttataggtatgtgttattacgttttgttaatttttgtattttttgtgtgtgtgtaaagataaggttttattatgttgtttaggttggttttgtatttttgggtttatgtgatttttttgtttgggttttttaaagtgttgggattataggcgggagttatagtgtttggtttatttgagtatttagaatagaaggatttaaaggcggggaattagttatatagatgatgggagaggtgaaggttagatagggaatagagaggtaattagtaggaaattaaagtggtgtgggtttatatagttttttaaaggtatggatgtaatgatttatttagaatgagaaaataaataatagtaaattataaattataagtagttgttaaatattataaatattattatatgtagaagagtattagttaattgttagttatatttttaaagttttattttttttatatttttggtattatttttttaatatgatgattttgtaatatcgttttttatttcgagaatagaaaattgattaggttggatatagtggttcgtgtttgtaattttagtattttgggaggttaaggtaggtggattatttgaggttaggagtttaagatcggttcgggtagcgtggcgaaatttcgtttttattaaaaatataaaaattagtagggtatggtggtatatatttgtagttttagttatttaggaggttgaggtgggaggattgtttgagtttaggaggtcgaggttgtagtgagtcgtgattatgttattgtattttagtttgggtgagagagtgagattatgttttaaaaaaaaaaaaaaaataataaaaaaaaatataggttgggcgtggtggtttacgtttgtaattttagtattgtgggaggttgagatgggcggattatttgaggttaggagtttgaaattagtttggttaatatggtgaaattttatttttattaaaaatataaaaaattagttaggtgtgatgacgtacgtttgtaattttagttatttgggaggttgaggtaggagaatggtttgaatttaggaggtagaggttgtagtgggttaagatcgtgttattgtattttagtttgggtaatagagtgagattttattttaaaaataaataaataaataaagcgaatgaatttttttagttgattaaattttgtttttatttttggtagttgggatgtatataaaagtggcggttaatatggagttggtggtgttgttataattgttttgtttaagatatataggaattttggtaaattttgtttttttttttttttttaaatgtgatttttattaagaaagaagtaggaaaatgggggagatttttaattgtatatgaggtatttgtgtatgtatttttgattagagagatttttttgttttgattttatattgaaggaattgaattttttgtttataattttatttttggtgatgggagtaattttttatagatttgtttttggattcgtgtattttaaattttgtttttttttattgcgtacgttttttcggcgttaggtatcgtaggatatgttcgtgttttgtgatttttgattttgcgcggtaggtggaattggaacggtgagtggagcgagtattgttggaattcgtttttatatcgggatagcgagtagtaattgaattatatatggaaataaatgggaattatataaatataattcgattaaagttaaattaaatatttttttagtttaatttttttttagtaggagtttttacgtggtagtaagttttcgtttttattttatataagagaaaatgtgacgggtaggaatttaagattggaaatgaacggggacgttaattgattgtagggaaaatattttttattttgtaaattttataaaaaatgtttgattttgtggatatgtggttagggttttttttagtgttttgagagggaattatgtaggtagagggagggtttttagtattgtgggggtgatttggagattggtagtagggtgttattattatttttaggtggggatgagagggaggaagttttgtgattagagtttaggggttagagttatttgttgggagtttaaataaaggtgggattttggtaggagttggaattatatagaggattattttttttgttggagaagttgtttgaggtagaggaggtggagagttttcgcgtttttttttgtttttattttttaggttttttttaagtttttcgttggttgaatttagtttaaagttagtaggtttggggatttggatatttgagttagtagaggtcggcgttttttttatataaaggagggtataagaagtgggaggtacggagggggattaggttaggatttatataggatgtgtaaataggagtttttttttttttttattttaaatggtatttgtagtcggttttatttttttgttgttagataggaagaggaattttgttttcggtattagttgtttttatcgttttttattttacggaggttttttttttttttggtttttgtttgtaattattggcgacgttgatggattatattttttggggagtttggttatgaatatggttttttatttgttgtggattaaattgtgtttttttttttgaatttttgcgttgaagttttaatttttaatgtagttgtaattgaagatagggtttttagggaggtaattaaggttaaatgaagttatagggtaggattttaatttaataggattgatgtttttataagaagagggagagatattagagattttttttttttttttatttgtaaatagaggaaaaatgacggaggatatagtagggaggtgggtataagttaggaagaggggtttcgtcgggaattaattttgacggtattttgattcgggattttgggttttttaaattgagaaatatatgtttgttgtttaagttattttttttatagtaatttggatggtagtttgagtttattaaggtatcgtttgtattagttagggttttttagggagatagttaataggagatggatggatggatggatggttagatagatagataagcggatagagagagagagagataggtagatatagatagataggtagataaatggttagatagataagtagatagagagatagagatagatagatataaataggtaaatagataggtagataaatggatagatagatgatagatagttaggtaggtagatagatatagataggtagatagatagatagatagatgataggttgggtttagtgatttttatttgtaataattagtatattggtaggttgaggtcggtggattatttgaggttaggagtttgagattagtttggttaatagggtgaaattttatttttattaaaaatagaaaaattagttgggcgtggtggtgtatgtttgtaattttagttattcgggaggttgaggtacgagaattatttgaatttgggaggtggaggttgtagtgagttgagattacgttattgtattttagtttaggcgataaagtgagattttattttaaaaagaaaaaaaagatagatagatgaatggatagatagttagatagatgatagatggatgataggtagatagataattgataaatagatataaatgatcgatggataggtagatatagatatattgattaggtagatgatagatggatagatagaagatagatggtggatgggtgggtagataggtagatagatagttagaaagatagatgatagatagataggaaggaatttattaggggaattggtttatattattgtggaggttaagatgtattatagaaggtcgttcgtaagttggaggtttaggaaagttagtatcgtggtttagtttaagtttgtaggttttaggattgggaagttgttgatgtaatttttagtttaaggttaaaggtttgagagtttggggaattgttggagaattgggagttttaagtttaagggtaggagaggaaggtattttatttttaggagaaagagggaatttattttttttttgtttttttgttgtttggtaatggaatggtgttatttatattgagggaggatttttattatttagtttattaatttatatgtttattttttttagaaatatttttatagatatatttagaagcgatgcgttattagttattttttaatttagttaaattgatatttgtcgttagttattatataggtttagaagaatcgtggttgtatggtgatggtttttatttcgtttaaagaagttgaagatgaattgttggtataagttatcgtttttttaggttttttttagtcgtttatttttttaaaaatgtatttattgagtatttgttgtatgttaggtgttgtgataagtattggggtatagtagtgagtaaataaggatttttgttttttggagtttatatgtagtagaaggaaatagaattaatgaatttattagttttagaaattattaaaataggattaagagttgtggtgagaattaagataaggtgattgtatagaaagtgattgatggttgttttggaatgagtggtgaggggttatagagatgatgatagttgagttgagattgggaagataggaaggagttagtagtgtaaggattaggttggaagtaagtttggtgtattttaggaatagtaaggaggttagaggggttgtagtagagtaggcgaggaggaggagggagacgtaggttaaagaggagtttggggttagatggaggattttttttttaaagtttagttattttttttttaaaggagaatgtgttatttttaaaagttatatatgttagtatagtgtttggtttattatatgtttttagtaggcggtgagtatggttgtttttgttattattatattataattattaggaataatggagttattaggttttgtatttatagtaatgtgagggagttagtaagtttttttggggaatttatttttttttattaagtttataagagtttgataattaggttaatgtagtgagagttatagttgtttagtgtattggattttttagttacgggttaggatatttttattttagtagaaatttttaaggggattggggagtgtgttgtggatgtttttgggttatttagattttttggggagttttttttatcgtagttgttgtagggagtttagttgtagtgatgaattgcggtttagttttgtttatgggaaaattttatatgggagatgggacggttttttgttggttttttcggttttaggttgtttttataagtgtagggatttttatttgggtgtgtgaatggggtttaggatgttttaagggtatgtggagatgggggttagttgttttttttgatgtttttgaattttttttttttgtttttttgtattttattgttttttggttttttttattttgggtgttttggaataatatgtaatttaatatataggttgattttattattttgttttgttttattttattttattttggaaataaaggttttgttatttagtttggagtgtagcggtgtaattgtaatttattgtagttttgaatttttgggtttaagtgattttttcgttttagttttttaaagtgttgggattataggtatgagttgttgtgtttggtttaggttggttttaaaagttttttattttttttgtattttgatgatatttattttttggagtaggtttttagttattggtttcggatattttgtagttattattggttagttgtggtatgtgaagttgaggtttaggagaagggtagttttgtttaaggttatacggtttagtgttaatatttagattttagtgtttttattttttttttggtcgtttttatttttagtgtatttttggaggtttaagggagttaaaggttaggttttggttagttaagaatttaaaaaagttgtttttgtgtttttttgttaatttattattttattatttttttcgataatgaatttagtttgaattttagataaataaggattaatttttagtataagtatattttataatagatttgggatatatttatgtttaaaaatgatttattgtttgttggttttagtagtttatgtttataattttagtgttttgggaggttatagttggagaattgtttgagtttaggagtttaaggttatagtgagttatgattatgttattgagttttagtttgggtgaagtagtaagatttttatttttttaaaaaattgttgattgtttatttgaaatttaggtttaattgagtattttgtattttatatgagaattttatataggtgagatttagagttttaatgtttattggtaagtttttgtagggaggttttgtgggtttttggttggtattgatgttttgtgatgagtagggttatttggtaaggtggacgtttgttgtttatgtaggtagagtaaggttttgggtaggtatgagttgattttattttttttagtttgggagttagatattgttggtagtttgtcgttaagagaggggttggttattaagagaggggcggtttttatgggttttttttggtttttggtttttttttagttttttttttattttaaatagaggttaacggtatcgtattagaattagtgtgttgttttttttggttggtattttgtagttgggtagattgttttttttttataggagttggtggtgtttttttcgttttatagggaggatggttgagatttttgattttgatatagggtgttgttttttttttgttttgagatagagttttggtttttttatttaggttggagtgtagtggtatgatgttggtttattgtagtttttattttttgggttttagtaatttttttgttttagttttttgagtagttgagattataggcgtgtattattattgagaataatgttttttatagtgtttatttttttgtaggagtaagtttttaaggtaaggaggttgttttttttatggatgaataaattgattttgatttatagttttacgtgttagttttgagggtggggaaaggttgttttgtgtttaggtagggggtgggggtaaggttaggagggtttggtgtttagtgtatttttttaggatataattttaggtagtagaggttaaggatagaggggaggagaagagggaggtggttattatttttttattttagttttttttggagataagtttgagtattttagttgtttattaagtttggagataagtttggaatttaaatttttgattttgatttagttttttatagtttttgtgagtaaattgagttttagaaaaagggagtgaagtttgtgtattttggacgtttttattttaggtttaaatcgtttttattttaggtttaaatcgtttttattttagtttaaatcgtttttattttaggtttaaagcgtttttattttagtttaaagcgtttttattttaggtttaaagtgtttttattttaggtttaaagcgtttttattttaggtttaaatcgtttttattttagtttaaatcgtttttattttagtttaaattatttttaatataggtttaaattatttttaatttaggtttaaagtatttttattttaggtttaaagtatttttattttaggtttaaagtgttcgtaatttaggtttaaagcgtttttattttagtttaaatcgttttattttaggtttaaatcgtttttattttaggtttaaattatttttattttaggtttaaatcgtttttattttaggtttaaagtgggaaggagttatagggaaataaacgggggaggtacggatgattaggatgagggtttttatgatttatttttttttaggggttattttaagagttttttaaatttttattattttttaatagagatggggttttgttgtgttgtttaggttgatttttaatttttagttttaagttatttttttattttagttttttaaattgttgaggttataggtgtgagttattgtatttggttttttttaggagttttaagaaaaaaaatgggaatagatttgtgtgtgtgtgtgtgtgtgtgtgtgtgtgtgtgtgtgtgtgtgttttgagaaagagtttcgttttgttatttaggttggagtgtaatggtacgatttcggtttattgtaattttcgtttttcgggtttaagtgttttttttgttttagttttttgagtagttgggattataaatatgtaggttgattttgtatttttattagagacggggttttattatgttggttaggttgatttcgaatttcggattttagatgatttgtttgttttggttttttaaagtgttgggattataggtttgagttatcgtgttcggttaggaatagatttttttttgtagatgatttttgttattattgaaaatggatgtttatgtataattgaattgttataacgttttattttaaaaagtttttttttgagaaaatgtgatttttgatagaggagagattgtttaggttttatttattgttagtataaaggtagagtaggggtgtggcggtgttatttttttttgagatagttttatttttgttttgtttaggggtttagaagtttggtttattcgagtttatagaggggtttggagtggttgttttatattataggtggggtttgtaaggatttgaaatgatttttgagaaggcgggtgtggtgggtgtattttaattattaaagtaataataatgatatattaaatagtgtttgtttagattttgagtgtttgtttaaatatttttattttgtgatttgttagattttagtataataatttaggtaaaagaaaaaatagttgggcgtggtggtttgtgtttgtaattttagcgtgaggttaaggtaggaggattgtttgagattaggagtttgagattagtttgggttatttgagattttatttttgaaaataaataaattaataaaagatttttatgttttatgttttttttatatttaggttttttaaattatatgtattggggaaagtttattaagagaagtttttggtcgggcgtggtggtttacgtttgtaattttagtattttgggaggttaaggtgggaggattataaggttaggagttcgagattagtttggttaatatggtgaaattttatttttattaaaaatataaaaattagtcgggcgtggtagtgtatgtttgtaattttagttacgtaggaggttgaggtaggagaattatttgaatttgggaggtagaggttgtagtgagttaagttggtgttattgtattttagtttgggcgatagaaaaagattttatttttaaataaataaataaagggagagaagtttttgggtttttagatatatgggttagtgtttatttttgtaaagttgttgtgtttaaagaggggttgtatttggtggaattggggtaaaagagtagggagggtattgggtagttgatttggtttttattattggaaaggggttgtgttgttggtgttttgagttggttttataaggaagatattgtatagggcgttttaagtttgttttttttgtttaggtttatttttttttttttaggattagggagtttcgttcgttttttgttttcggtatttgttttttggtttgtgagtattgtatttttttttgtttggaacgtcggtttatggtgggttttcggatttttgttttttgttgttttttgttatatttcgttaaagtgtgttttatttatttattgttattattttttgaaatagagttttgttttgtcgtttaggttggagtgtaatggtgtgatttcggtttattgtaattttcgttttttgggtttaagcgatttttttgttttggtttttcgagtagttgggattataggcgaatgttattacgttcggttaatttttgtatttttagtagagatggggtttttttatgttggttaggttggtttcgaattgatttcgggtgattggtttacgttagttttttaaattgttgggattataggcgtgagttattatgtttggttaattattataatattgatattataataatattatagttagataacggtgattaacgtttgtaattcgaatattttgggaggttgaggtaggtagattatttgaggttagttcgagattagtttggttaacgtggtgaaattttgtttttatcgaatatataaaaattagtcggagcgtgatggtaggtgtttgtaattttagttatttgggaggcggaggttgcggtgaattgagatcgtgttattgtagtttaatttgggtgatagagtaagattttattttaaaagtagtaataataataataataataataatattatttattgagttttaattttgtgttaggtattgtgttagtatttgcgttatgtgattttattgattcggaataatttatgagtaagtattatttttgtttttaaggaagttgagatttaggaaatggaagttattttttagggtttatagtaagggtttggcgaggtttgcgtttaaattttgattatttgattttaggtttttttgttttttttgttttttaaaaatttaaatatttttatttgggatgattttagatagttagattttaattgttttttttttttttgagtatgttttattttaaaattatataaagataatttattttttaattggagttacggaatcgttagatgttttggagatttttttagttatttttttgttggatttagatataggtttgaataattaggtttaaggagttgaattggagtcgttcgtggttagaggtttttttttgggaatagtagtggcggtagcggttgcgttgagtttggtaatttgtttaagagtaggggatgtttaggttgcgttcgttttttttttatgaacggtttgttttgcgttttttttgtgttaagggttgttaggtattagatgtttattttaggaaattagaaaaataaatagtgtaaataaaataaaaattttatttaagaaatttgagatagatgttgttttttttatcgtttttttatttttatgttgggtttggagagagtgggttagtatgttttttacggataagaggttttggggtatttaatttggatggaattttttttattttttttttgtttggtgttagggggtagaaggtaggggtggtgtttatttggtttagggaggaggatagggtagtttttgtcgtcggtattttttgtagagatgttttagttagaagtgattttatttttaggaacgtgtgttttgttttttgttgggcggtttttttttattttttattgtttttatagtggggtgtgttagatttatgggtagagttttggtttatttttagtttcggatagtagaatgttttagtagtgtattgatggtgtgtgcgtggggatgtgtggaataggggatagtgatttcgtgtgcgttatatgtagtgcggtttttagtcgggtgtgtgaagggggtgtttatggttatcgtggaagtgagtttagttggggttggagggtttaggtttattgtatgttatttagtagttttgggagtggggtttattttttttttcgtttttttttttttttggttttgggtagtttatcggagttgtattttgggttattttttttggttttaaggaggttgttatttttgggaggtagatgttggtttttttatttttgttttttggagatttgcgtcgaggtttgtttttttgtttggagggattggttaggaatttttgggtttttttggtggggtttttgttgtttagtagtgagtagagtgagtgggtattaagaggaggatgttgggtgaggttacggatatggttggggtaggttgggggtgttggaggtgaatttcgtagttgtgcgattttgggtagtttgtttagttttgggtttcgtttttttttttatgaaatggggcgggagtatttgtttgttggggttgtgggttgggtgaatcggagttaaggtatagtttatagtttgtcgttagattttcgtaagtagaagtgggtgtttttgtttagcgtttttcggttttttttttaaggtttagttttgtttttattttttttatgaagtttttttggttattttaggagttacgatttatattttttttggagttttgtgttatacgtattttttacggtgttgttttttttggaggatgggtttaattaaaattggggtttatttgggggttttttttagtattagagaagtttaggtttagtagagatgggtattttgttaatattagtttcgcgaaggatatattgtgtttattttgttgttagttgttgagtttggtgttttgtagttatggaatatgtgtataggtttgggttgttggatacgaaggttagatgggtagtttattttgttttcgttttgagtttttagaaataagttggttgtatttatttttatttggttatagtttaggagtggggttgtggaatggatggaaggaaggatgagtgggtgggtgggggggtgggtgggtgggtggatggatggatggatgatgggtggatgggttgatggatgggtggattaggtggataggtgaatggattggtgggtgggtgggtgggtgaagggttgaataggtgggttgggtggatgggtggatggatgtgtggaggggtggtggggtggatggggtttatgggtgaatggatggatggatgggtgaatggagtaaatgagtgggtggatggatggatggatgttgtaagagtttttttggagggttttagggaggaattggtatttttgattagtagttagtatggtgattagatatagggaggtgtttgggtttgtttgattttttattttattgttggtgggattgggttggttatgtgtttttgaagttttttgaagggtggttgtatggtattgtttaggggatatttttagagtgtcgtgttttatagtaatagggtggtcgtttgtgtttttagggtcgttttttttggtagtttttcgggtttgtttggtttagtattttagtaaattttttcgagttaggatttgtttgttatgagtttttttaataagtagttttaggttaaggtttgtgtgtgggtagagggagcgtatgtcgcgggaggttgtattaatttgaggttttgtttttgtttttttttggggtaaaaggtaaaaatagtttgttttattttatttttaaatttagttcggttgtatttagttttgggagtgaagggggttgggttaggattgttcgtgagttgtagattttggtgtagggaaattttgatttataagacgggtggatatggaggaaggaggagatttcgtttagtagagatacgtttgggtgtagtttagtttggagtttgatggacgtgggtttatttgtgtgtaatttttatttattgtgtggttatagggaagtgatattttgtggagatttagattttttatttgtaaaataggggtagtagggtttgggggaggatgtgtgtgaaggtttggtttagggtttttttagtagttagatagtagtggttgttatttttttagcgtttagggttatttgggggagtagggtttttgtttttagatgggtttcgtttttggttttggaatttatagtaggagtaaaggcgaggatatttttggtgttaattatttattcggagggagagcgttagtggttttgtgtgatttttgttttttgtttttgtttttaggaggtacgcggatttttagtggtcggtttcggaggtttggtgattttagtggtttaggtaggtggttcgtttcgttttggttttatttagtttatgggtgtgtttgtgttggggtttttttattttggtttgggatttgtttttttatttggtttttttggatgagtggggttatttgtttattttttagggagacgtagtttttgacggttttggatttaggtggtttttaggtttgtcgacgttgttttgttggagatgatttttgtgggggtaggggtagttatttttaggtttagggagtaagttcgtgtgtgcgggatagaggagagaataggagatagatagggttggatgatttggtttgagatgttgaggggatagatgtgttatggataggtggttttggtcgtgagtttttcggtgttggtttagtatttgtgggttttttgtaattttgtaggatggaagatgttttaggatagagtagatacgttcggtgttatttaggaggaaataagtgggtttttggtagtggttattgtgttattttttgtgttttttttatgtgtttggaaattttttatattaattagtagggaagggaaatagatgtatttattagagttttggggttggtcgtttaggatacgagttatagtttataggtttgaagggattttattaatattgggtgtagtttgggtaagggagtgggatagagaggttagggttttgtttttagtttttgttttttagggttgagtttgcgcgttattttttttttattgggtgtttttgattttttttgtttgattttagtgtggttatgttagtgtttttgtttttgggagtttacgttgtttttggttgttatttttagcggttaggttgggataggtgtttatttagtggtttttttatttggagaggatgatgggttatagtaatgaatggatttattttttttaggagacgaggagttttgagaagagtagagatggcgtggttatttgtgtatatgtgttgggggttaattgggtgttagatttttggttgttattatggtggtagataggtagggattgtgtttttatgaattagttattttagaggagataaagttattaaaggatacggattcggagttaaatttatataaatagagcgtttgtggattagggttgtttttagaataaggtgagatagtcgttttgttaggataaggcgtttacgggggtaagggtatgtgtttatttggagtcgttatttttatgttttagattagtttcgtttaatagaattttttgtgatggtgggtttgttttatatatttgtatttcgttattttgtatggtagtcgtttagtcgtttgggtttattgtatatttaaagtataaatgtttacgtttattttatttatttatttatttgtatagaattatttatttattttaaatggatttttatttatatttacgtgtggttagtggttatgaaattgaatagttttagattatattggtatttgagattttagaattttagatttaaagtttgtttttgattttgagtttgtttttgtggggatagtatagacgttttttaagtttgttttttagaggtggatgtagtgttcgtggattgtgtattattaggtttggatagtggagagggtggttttttatagggagtgggagtggaggggatgtcgtgtttatattgagtgtatgtgaggttttttgtagtataggatgggattgtatgtgggaagaggggggtgatgttttggttggaggtttttgggtagttgtatgatttagcgttgtggttaagaggggtttcgtttatcgtagttatgttgggtattaattattggatagtttagtcgttgttgtgtttttggggagttttttttcggtttcgtatttgatttgtttttttattttttttttttttattggttagtttttggtggaatgggtggggagggttttttagtttttgtgggggttgtattttgggaatttggtattttgggttgtatggatatagtttttttcggcggttgtttttttttgtttagattggttggttttgtgttgttagtatttggtagttacgattatagtttagtttggaagtttaaggtataatttgttgaattttaaagttgtaagttggtgatttgggtttgcgtgggattgtttgttgatatacggggttttttttttgtgggtttttgtgggttttggttcgagatattttttttttatttttttggtttttttttttttttttgttttttttttgttaagattttggtttaggtaggagtttatttttagacgttttagtattttcggtttttttatttgatattttttagacgattgtttgttattttatttttttagtttagtttttttgtagatttatatttggttaattttttatgtttgggatttttgttttttttagaaggacgaaggtttttttcgaggttgtgtttgggattgggttagggatgatatttttggtaaaagtttaaatgatattatgattaacgttttggttagtttatatattttttttttttttaaaaaaaaaatggaatttttagagttataaaataaaaatgtaaagaataaggtaataaaatatttgtgtatttattatttcgtttaagaagtgagatattgtaggtgtagtcgtagttttgggtgattttttttattttagttttatttttgttgcggtgttcgtttttttggattgggatttggtttcgggtaggtatatttgtgttgggtagtggtgtgtttgagaagtttaggtttttttttttttttttttgagatagagtttcgttttatcgtttaggttggagtgtagtggtattatttcggtttattgtaatttttgttttttgggtttaagcgatttttttgttttagtttttttagtagttaggattataggtattcgttattatgtttggttaattttttttgtatttttagtagatatagggttttattatgttggttaggttggttttatatttttgattttaggtgatttatttgttttggttttttaaagtgttgggattataggtgtgagttatcgtattcggtttggtttttttttgtatacggttattagtatcgtgtgattgagtagtttaggtttgtttttttttgaatgtcgttattagtattatatttttggtgttttattggagttagtggttgttttgtttgtgtttataacgtgacggcgtggagatttattcgtgtagatttacgaagttttggtttatttattttggtagttagcgagtgtttttttgtgtggggaggtagagtttgttcgtttcgtggtttattggtgatatcgtcgaaggttttttttgttattagtgttgtcgggaacgtgtgtttttttaggtggatttggttgggttgtggagatgcgttttttagtttttttagatgttattattacgttttttcgagtggttttttggtaggtttttttatgttcgtttattttttgtgttttaggtagtcgtttttttgattgagcgtttagcggatttttgttttgttttttacggtgtacggagtattttattttagtggtgtttgagtttttttttttttggtttttagatttcggttgggatttttggagttaatttttttgtttgatatttcgtgtcgttaggttttgtttttttattttttaatatttttggggtgtgtggttttttttttagtgtttttattattttttttgttttaggttgaatcgtgttttttataaatttatgtttattaaaaattttagaatgtgatttgggagttggagatggggtttttgtagatgtaagtagttaaggattttgagatgaggttattttggattagggtgggttttaaatttaataattggtgtttttaaaagaagtagagaggttatagatatatcggggagagttacgtgaaggtaggagtagatgatggagtgacgtagttttaggttagggagcgtttgggaagaggtaaggaaggattttttttttattttattttagagtttttttagggagtgtggttttgttgatattttgattttggatttttggtttttagtatgggagagaattcgtttttatttttttaagttttatagttgtggtttattatggtagttataggatattgatgtattttttatttggtcgttgtggatggacgatttcgttcgtaggaagttttttttaagtattgtaggtgtttttgtttttataggggacgtttgtataagtaggtgtgaaaaaagggttttgtgggggtaaggtttgggttggtgttcgttgtttttttttattttatgttagtttttatgtttttttcggtaggagtgtttggttttatttggtgaattagagttaaatttttttgataattggttgttatttatttaattgttattatttttaggagatagaaaatgttagaagggtggggtttgtgtagtgttttttcgttatttttttagggtatcgtgttacgttgttttaatgtatagagtagttgtttaaagtgtgtcggacgaataggtgttttatgtttagttatgtagataaaagtgtgttacgtggagggagttggtcgtggaagagattattagtattttggttgttcgaggattttgtttttgggtttttgtaggtatttttagtttattatttttttttttatttatagttatttattttttttttatttttttgatattagttttgttatttatttaggtttgtaagtaggaaattttagagttgattttgatttttgtttttttagtatttttaggttttaataggttgttaagattttattaattcgttttttgtatattgatttttggataggttgtttcggttacggttatgttttggttgggtttttattatttttttttggattagtaggtgttattttttttatttttgttttgttgtggtttttttttttttacggttaatatttagaggacgattattatttttttttttgtgtgttggggatcgggtgataggatttttttattcgattatttttattagatttgggtcgggtttttttatttatagagtttttagttttcgtttttaaagtttcgagggtggattcgtgttgtcgtttagtttggttttgatatcgttttttagtttggagttttttgtttttgcgtttttggttttgagtgttcgggttttttttggatgggttgttatttgttttttggaaagtagggtttttatgtttttggattttttagttgatttagtgattttgggttattttgttatattttttttattagtttggttttggttatttttgtgttttttatagtttcggattagagttacggcgggatgtttttttggtgcgtggtaggtagttaggaaatattgttggattgattttgataggagatgtttgggagaattgtttaaaaaattagtttaaaatgtaaatattggtttttttttgcgttggttaaagagtagtattttttcgtttgtttttcgggtaagaaattgatggcgaatgtaatgtttttagggaggagaagaaggtgataaaaagggtttgtataacggggtatacgttaggtatttgtgattatttaagtttaaattataatataaatgcgaaattttttgttttggtagtttttttatattgtaagcgtttattgttatatgtggttgttatattgattacggtagatatagaatattgatattattgcggagagttttatgggggggcgttggtttagattatttttacgttggatttataaatttattgtttatttagtgaacggttattgggtatttattgagtaagtaggatgaaagatattcgttttcgggggagtttttcgttggttgtagagaagtttaaatttaggggatttggggtaaattttgtaagggtttttggtttttgtatttttagatttttttcgttttgtaggggtagtcgggggttttttttaggaatggagcgttagttttagtttttgttaggttatagtttagatggttggttgagtacgagtatgtgagagtggaattgggtttaatcgggttgttttttttcgttgttttggtttttttttacgttgatttggaaggatttttaaagtaataggtttgtttaggcggtttgtattagtaaattttgtagcggttttaagggtagagatagttggattgtatttatttaggaatagttaaagtttgaggtataataaaaagtggagaaagattttagagaggaatgtagttggttttagtttgggaattcgttttgtttgggaggttgtaggcgggttaggttggggttagtttggagggttttggttggttttgttggtaggtatagtagtagggttagtaggagggagtttaggacggagtttttttatttttaatttagggaagtaaattttagtggttgagtttgaggatgagtaggaaatgaatggaaaagtttttttttttttttttttttttttaggtagggtttttttttgttttttaggttggagtgtagtggtataattatagtttattgtagttttaatttgttaggtttaagggatttttttgttttagttttttaagtagttgggattatagttgtgcgttattatgattggttaatttttaaaagaaatgtttttaggttaggtatggtgatttatgtttgtaattttagtatttttggagtcgaggtgggaggattatttgagtttaggtgttttagattagtttgggtaatatgacgagatttcgttttgattaaaaatataaaaagttagttgggcgtggtggtatagttttgtagttttagttattcgggaagttgaggttgtagtgagttgtgattacgttattgttttttagtttgggtaaagggagtaaggttttgttttaaaaaaaaaaattttttttttttttgaggtggagttttgttttgttgtttaggttggagtgtagtggtatgattttggtttattgtaatttttgttttttaggtttaagtgatttttttgttttagttttttaagtagttgggattataggtatgagttattgtgtttggattttttttttttttttttttttttgtagagatgggatttttttatgttgtttaggttggttttgaatttttggttttaagtgatttttttattttggttttttaaagtgttggaattataggtgtgagttattatatttagtaggaaaagttattttttaaagcgagaggttgtgcgttttttatagtttggcgtttattagtatggaggatttattggaacgtgtgttaggtgaggggatatggaagatggtagtaaattcgagtttagagtattagaaagtatgtttttagttaaagatgcgttttttttattttcgcgtagtatttttttttagtgtgtatttttggagtaaggtggggtcgattttacgaagattttttttcgaaggtttttgttgtttatattagtgttatttggatcgtttgtttttttttttggatggttggattagttttagggttttttggtttggtgtggggagtatagtttattttggggaatgtttggtatgtgttttttttttattgggtattaggggatgaagttgtgtttcgtggaaggggatagaggcgttggtgtttaggatggtgtatttggggcggttgaattggatttggtttttattgggtttttgtggagtttagattgttgtgagaaggggtggggaaaggtaggtgattcgtattttttatttttgttttatatgggaataggggtttattttgtatatatatttagtttggagtatgaatttttatgaagaggaaaatttttattaggttttgatgttaggattgttcgtgagggtcgggtcgtgttttggggtaaggataggagtggagggggtaattagggaaggttttttaatggaggaggtatttgatagtattttgaaaaagaagtagtttttaggttaagttagagattgaagaatgattatttaattttttttttttttttttgagatggaatttcgcgttgtcgtttaggttggagtgtagtggcgtgatttaggtttattgtaatttttattttttaggtttaagtaatttttttgttttagttttttgaatagttgggattataggtatgcgttattatgtttagttaatttttgtatttttagtagagacggggttttattatgttggttaggttggtttggaatttttgattttgtgatttatttgtttcggttttttaaagtgttgggattataggtatgagttattgtattcggttacgattatttaatttttttttataagatgttttttggttgacgtaaagtaggttgagtgagtgtgatattttttttttgtttgtgggtttcggtttttttagagttcggttagtgttattggagataaagtggttttcgtttttttttttcgttttgttaggtttagtttgtgtcgttgagttttattttgtaattaagaggagttgtgaattagtgatgttgatgtcgtagaaaagtggttaggggtttatggggggtgaaggatagggatgtcgttttgagaattgtttggaaggggtttttgggtaatagtgtttattttagggtgtgggtaggttggggtggttgggagttgggtttataggttggtataattagagttttttaaagtcgtgggtttgagggttttgtttttttgggatagtaatttttggtttaatttgggaaaaggtgggttaaattaagttcggtttttttattgtaggattatttagtgcgtttagtatgtaaatgtgtttttgaatttaagataggattatagaaatttttttagtgtttttttggagggagggatcgcgggggatttatcgtaggggtttgggtttgtattggtttggtgaagtgtttttttagtgtttatattatgcgcggtgagaggttggttttcgttttttttattttttgttggttttattttattatttttgtattcgttttttagtcggtttatgattaatttttgtttttttagagttaatcggtgttgttaggttttttattttaagtgatttttcgtttgggttaaaatgtttggatttttaggtacggaggggagatggattttaggttaaattatgttgggtaaaattgagggttaaggttgtgtttagtaagtgttttagttttggtcgttaaatttatagtgtgtatagcgtgtaggaggtggttgggtgaatgaatttagttatagttcggttttttattcggggttgtttttaagtttttatcgttagttaggttgggttagagtttcgtggggtttttttgggtttttttgttttatagtaggagttcgtatggagagtttcgagtgaggttaatgggtttttttttttttttttttttttttttttaatttgagatagggttttattttttttatttagttagggtgtagtagtgtaattatagtttatagtagtttcgaatttttggttttaagtaattttttcgtcgtagttttttaaagtgttgagattataggtacgtgttattttgtttagttggggtttttgttttttatttttttttttgtttttaaatttaatataaagaaagatattatatttataattagaaaaattaataaggaatattattttaaaattggaaaagggattaaagaaataaattaagaaatttttgcgatttttgtttatcggagttagtggttgttagtggttggtttaatataatgttttaggaagaaatagaataatagaaagtaattttagtgagttgagttttggtttcgtttgtggcgttgtattagttttttgtagttgttgtaacgagtggttataagttggttgggttataataacgtttagttatttttttatagttttgtaggttatatattcgagattagggttattaggttgaaattagggtgtttattgggtatagttttttggaggttttagggtaggggtttttagtttcgtgtgttttattaggaattggtttgtatagtaggaggtgagtgattggtaagcgagcgaagttttatttgtatttatagttattttttattgttcgtattattgtttaagttttgttttttgtttgattagttatggtattggatttttataggagagtgaatcgtattgtgaacggtatatgtgagggatttaggttgcgtgttttttatgagaatttgatgtttgatgatttgttatcgttttttattattattagatgggatcgtttggttgtaggaaaataagtttagggttttaattgattttatattatggtgagttgtataattattttattatatattataataataatagaaataaagtgtataattaatataacgtgtttgtggtcgggtgtagtggtttatatttgtaattttagagtgaaattttgttttaaaaaataaaaaataaaggttaggtatagtggtttatgtttgtaattttagtattttgggaggttaaggttggcggattacgaggttaggagtttaagattagtttggttaatatggtgaaatttcgtttttattaaaaatataaaaattagtcggatacggtggtaggcgtttgtagttttagttttttgggaggttgaggtagaagaattgtttgaatttaggtggcggaggttgtagtgaattgagatagtgttattgtattttagtttgggtggtagagcgagattttgttttaataaaataaaataaaataaaataataaatataatatatttgaattattttaaaattatttttttattttttggtttgtggaaaaattgttttttttgaaatcgattttaggtgttaaaaaggttgggggttattgtttttatcgtttgtttttttgagtttttggtggttgtgggtgttttttggtttgtggttgtatggtttttatttttaatattagtatttatagattttttcgggttttatttttatttggttatttttgtttgtgttaaatttttttttgttttcgttttgtatgagtatcgagattgtttttagggattatttagattatttagggtgttttcgttatagtaagatttgtaattgaattatagatgtaaaaatttttgttttaaataaggttttatttgtaggtttagggattaggatatgttatttttggggttattatttagttttttttcgtgattatgatttttttttttttttttagttttttatttcggttgagatgttgtttttattttttttattgtttggttgtttgtggggttgttttttaggttttttgggaggaggtggttgtttgatgttttttagaaggttgggaatggttttttttattttttaggaagatgttttttttgttaaggagattgtatttggggttttattttaggtagagagcggacgggattgtggtttgaagtggtattttagggtttttggttttgttatttagtcgagggttgtgtatgggttttatttggttataggtaatttatttggttttgtggggtagggattgtaaatttagaggtttgcggggtgtgtcgaggtagaggggtgtaaatattgtaaatttgttgggggttttggggagtagtatagattgaaaagtgttttgtttgaagagtagaattgttttatattagttttgtgcggttaggtaggaaggttttcgtggtgcggttacgcgtttttttttttttaatagaagttgatagtttggagtttttagagagattgtttgagtttttagttttggtataaatatatattttttttaaataggtttgggttaatagaattagttttcgtgtttcgggtttgaatgaatttttgaggtgaagtttaaagatagagaggatgtttttgatttttattttagggatttatattgtaaatttttatttgttttgttgagtttttggttttagtatggattttgattatgtgttggtggggattttttaggtaagtaagtagtttttgaggatttcggatgaatagtggggaatagtattgattttttagtggggtttcgagttttcggagaggaagattcgtttttttttaggggacggttagagatttattgatttatgcgtgtgtggtaggaattttttaggaagttttcgtttcgttcgttttttttgtttgggcggggacggtaattgtttttgttattgtagattaatgggacggaggggggtgattttttagggttttttttgggtaggtgtttcggaatttttttttagtacgttggtttggggtacggtcgttttttttgtttagttacgttggggtatagggtgaagaagggttggggttagtttaggatagaggaaggcgaggtaggtacgtaggaattgggttttttaaatttttaagtttaaggaaatcgtagtatcgcgggatagggaaaatgaaagattttggaagtcgttaggaatttgattttgtgagttggtttttaagagtttaagttaagtatttttaagtggatattaaaaaggagtagtaagtttcggggcggcgggggttggaggaggtggagagaggaggttgtcggaagtcgtattcgggatttttgtagttatcgattagatcgggcggtcgggattttgggattttcgtaggtagattcggtggtttgtcggatttttcggggtttatttcgggtttttttttttgttttttatttttggattttttttttttgtttttttttttttttcgttttgaagagataatgttattttagtttggagtataaatatatgattagtatatggaaatgtggtaattcggatgtattcgtgattgtaatagattgaagaaattagattagataaagagtgtttttagaggaggaggaggaggaggaggaggttgagagagggagggcgacgggggtgagaaaggggaggtcgtttttgagcgggacgtcgggattttcgtcgttgttaaatatattcgtaggaatggagagggatcggattttaggtacgtagatagttttttttttatcggtcgttttttattgttttggattcggggttttatttatgtttgggggaataagtatgtaaagggcgtttttgtttattttttatagaaatattttttttttttttgacggttttaagttcgtgggatgaatttcgttttagaagttaagtttttttgagtttggtttttatttaaattcggttttttttttttttggttattttttttttattttttagtgtgttatttttgtatgttatggttattgttaatgttgaggttgttggcgtcgaaattttgggagggtgtgggggatttgtttttttggttcgggtttggggcggcggcgtttggatttggttggtggttggtttgtttattgtgtggtttgttttttgtttttagttaaagtttgtttttaaggttgtttcggttttttatttaaaatagtatttttgtgtttttttggtagttgattatagagggggaagttttcggcgtttagaggagtttggcgtgtgtgtgtacgtgtgtgtgtatgtgtgtgcgtgtgtttatttacgttggtagtttttttgtcgtaggtatagatttattagggcgtgaataggtaaatgaagagaaagggggtttttttgtttttagtttattttagttttttaggtttttttttttaggtttagtttttttggtttttttatttatatgcggtgtcgtggttgttattttacgtggttagcgtcgttatcggtaattagtagtgatgatagtttttgtcgtttatgtcgttttttgagtttagcgttgggagatatggggtggttgagttaagttttaggttttgggtattttgaagtgatttacgggttatggagcgggaggtcgttaagagtgttaatttttacgtgttttgggttttggtttgttggttgttattatgtgtgtgttggggggtttttgagaggtttgagagagggaggtttatttcggtggtttttttttaggacgtgtggttttttttattattgtttttagggttatatttttttttttttttttttttgagacggagtttggttttgttgtttaggttggagtgtagtggcgcgattttagtttattgtaagtttcgtttttttagtttatgttatttttttgttttagttttttaagtagttgggattataggcgttcgttatatttttttgtatttttagtagagatggggttttatcgtgttaattaggatggtttcgattttttgatttcgtgattcgttcgttttagttttttaaagtgttgggattataggcgtgagttacggcgttcggttttagggttatattttgattgttacgttgggattggtggagcgggtgtgtgttgtgtcgttgagtatatttagtcgggtatagtaggcggattttaggagggggttaggggagacggtagaaggtttgggtggtagtgaaattgtattttatttgtttgagttcgggggtttaggttcgttgggacgggtgggtgtggagtttagcgttttgtttttcgtttagtaggagtcgtagggtagggagcgttgagagggattttcgttaggtttgtatagtggagtcgttttcggagtgattattttattaggtagtttgggtagattatagtgggttttttgttttttgggttattagttttaggaggacgttattttattcgtttggttggtaggggtttcggggagtttcgggttcggtttttattttatagatgatttagtcgaggtttagatgggtgattagtaggggatttgagagttgagtagagaggcgtgggtttgggggtggtgttttttggggagttggaagtgatggtatttttttaggtttataaaatacgggttttttatgaattgaataaaatattttttgaaagtagttagtgttgtgttttagagattattttgatttttgttgtttttggttgaggatagtatagttagggatgaagcggggattttttttcgggttgtgttttgatgaaagatgttttttataaaattttattcggatgtgtttttatgtaagaaaacgtatatttttagaaatttagttgtaaattggttgtttttcgaatgaatacgatagtttcggagttgttttttttaatgaggttttcgttttgggtaaattttagcgttggtttttaattgttattgaattttcgtatagtttttggggaagtgattttttttttgtttttgttgggtggttttgagtaagttatttggtagttttgggtcgtagtttcgttatttgtaaggtgaggggtgggagcggtacggtttttaggtagcgtttttattttttgcgggtttttgcgcgtgttttgagttttgtgggcgtttttttttttattgaggggttttttttttttgtagggtatggtttacgtcgcgttgttaggttgtaagttattgcgagagttgttttgatttttaagtatgttttggtttgaggaggagttatggggaggacgttgtgtttgtgtgatagaggtttgttcggtagatgtcggttcgttgatttttagacgtggttgtgggtgttttatgttttattgggttggcgtgtgaggcgtgtttagtttaggttgttttatagttgtttaggaagggtttgtgggagggggtggttttattttggtgagtttacggtggtttgttagttttagggaaggtttaggagttttaagatttgtttttttgtttttttttcggtagtgtttggtttcggtttggtttgtgaacgggggtttgggtattttttcgttttttttgggggttgtggtttttttttgggaaggtgttggagggtttgttagtagggtcggtatgagttatggagtggtgattggtcgttgaggtatggaaggttattttttttagttaagggtcggagttttttttttgttttggaacggttttgtggtttttataaattaagtagttttattttgttttaagagtttgtattttagtagggagagagtttttaagaagggaattttttattggggagttttgttgggttgggaggttaggaataggttacgagggagggttgtaggtaggggaagtggtcgtttgtgtatggttatgaatgtaggttcggggttttggagggggtttggttacgttgtcgttggacgtttgtttttattagggtttatttgatgtagtacggtatagggtaaagtttagttttttttacggggtttttgggttattagtgggcggggaatcgaggttttttggagggcggtgttttagtttttattttttttttttgtttttcgttgtgttgttttcgatggtttttgttattttttgggagtttttatttttggacgttcggtgtttgttcggttttaatttttttagttttgtttttttattttcgaggtgagaggtttggtttgacgcgttttgtattcgttttttgtttagtttcgtgggaattttggtttttgtagtggttttttggggttgttattattaagtgttataaattgggtggtttaaaatattagatattttttttttcgtcgttttggaggttagaagttcgaaattacggtattagtaggtttggtttttttcggaggtttcgagggggagtttgtttttcgtttttggtagtttttggcggttttcgaaatttttggcgttttttggttcgtggttatattattcgatttttgttttcgttgttacggggtttttttttgtgttttaaatttttttttgtttgttttttatacggatagtttttttcggatttagggtttattgggtaatttaaaatggttttattttaagatttttaattttataacgtttgtaaagattttttttttaaataggttatgtttataggttttggggtggatgtaaattttaggggttattttttatttttttgttgttttcgtgtgtttggatgtatagtatggttttatgttttagattttttgttggatttttttggttttttggggtggtttttggttttttttattcgtttttgtgtttttggtgaggtgtcggggtcgggtttagtttttgtaggaattttggggatagtatggagtcggtaattttttattaggcgtttttttatttgtttagagtttatggttgtgaggggtttttttttgtggttttgatttgtaattttttagtggttagtgatgttgagtattttttcgtgtttattgtttatttgtatatatttttgtagaaatgtttgtttaagttttttatttgtgtttgatttggatgattgttgttgttgagtgttaggagatttgtagattaatatttagatattaattttatatttgatttatgatttgttgttattttatggattgttttttttttacgttgttagtgttttttgatatgtaatttttttttttttttttgagatggagtttgattttgttgtttaggttggagtgtagtggtatgattttggtttattgtaattttcgtttttttggttttagcgatttttttgttttagttttttgagtagttgggattataggtattcgttattatatttagttaatttttgtatttttagtagagacggggttttattgtgttgattaagttggtttcgaatttttgattttaagtaatttattcgtttcggttttttaaagtgtcggagttataggcgtgagttatcgtatttaggttgatatgtaaatattttaaatttttatgacgttttattttatttatttgtttttttgttgtttgtgtttttggcgttatatttaagaaattattgttaaatgtaacgttaggaagttttttttttgtgtttttttttaagagttttgtggttttagtttttgagtttaggtttttgatgtaagttgagttgatttttgtatgtggtgtaagggttggtttagttttatgttttgggtttttgatttattttttttttttttttacgtttagttggtttcgttgggtggcggggaggagtggggaagtttcgggttgggtttgtattcgattatttttttttaggttagttagggagttttagtttttgtttaggatttggttggacgtgttttttatcgggaaagtttgggtcgtttttttaggttgatggtagggttagttcggggcgttttgaggtttgttttgcggatatgttttttgttttaggtggtgtggttgttcggtttgcgtgtgagattagttgtttgtgttttaggttatggaggttgagtgtttttagtttgtttttttgttcggttttttttttggggaagtttttgtagtttattttttgttttcgtttttgttatttgtgtttttgtttgttttttgtttggaggtggttatttttggggttattttttatgatttggatataagtttttattttgaagttattatttaaatttttgtgttttaaattttttttatttattatatgggtttttattgtgattaatttagtagttgatgaagttttttttggggtttttttagtaacggggagttggttttttcggaggtttggtttttttttaagtggaagtggggcgtgagggtgttagtttttttttgttgtttggtgttttaggttggtttgttatttttggaagtatttgttatttttatatagtattttatatttattttttcgttttttatttttttttttaaggggttatttttgtttttttttttatttaattttatttatgtggttcgtttagtaatttttgatttttaatatgataaaataaattttttttgtcggttatttatttatttatttagtattgggtgttttttgtggatttggcgttggggtttcgtggaggataaagttagatatagtttttgtttttatgggattgtataagtgtaagattatattagtaaacgtgaaatataggaagtgataggtgtgataaaggggattagtggtaggatagaatttgcggttcgtaggattaggttaggagggttgtttcggggggatattttcgggttgagcgtagaaggatgaggggagtaaattaggtttaaatttagtaggtagaggcgatcgttgtaggtaatcggtaatgtgtttaaaggttttggggcgcggggggttgaggtcggtagtacggtaggaagtaagattggggttgaaagagattgattgttatgttgtgaaatatatatttggtttttatttttattttttggtatataatttttaaaatttttggaatttttaaagtgatgtttttttggatgtttatgattgatagattagttggtagttttaggatggtttttagggaagattaggtagaattataaggtttagtattatttcgtaatttttaggtaggggagaggggttgaaggttaagtagattattagcggttaatgattgaattaattatgttttcgtaatgaggttttcgtgaatatttagaaggatggggtttcgggagtttttggatggatgagtatgtggaggtttttggagggtggagcgtttggggagtatatggaagttttgcgttttttttttatattttgttttatatatttttttttttgtattttttgtaatattttttataataaattagtaaattttatgagttttaggaatatgtgtaaaagaaaaaaaaaagaataaattatagttgttgtagtaagttaattttattagtattggtttttatttgtcgattttatttttggtaatgttttttttttttgggtttttgggattttttcggttttattattttttttgtagtggtttcgttggttgttgtttttaggttagtttatttttattcggtttgtttttattaggggttgaggtttttttgtttattttagttttttggttcgttttttgttttgggtatttttttatttcgaacggttagagtttttgaagtcgttcgttgtgtgttttcgtttggttttatgtatttcgtacggtgttttttagggttttttattggtaagggtattggtatagattttggggttgttttggtttaagtttattttgatttggagtttgagggtttttgagggggttttgaaggttagggtaggtaaggttggtatgttttgggtagtgggggttgggtatgggaggggatcgtgggtggggagattttttttaattagcggtttacgtttggagattgatttgggttttaggttacgttttgaaattgggatagagagtggcgtagattttagttcggagattttttttgtttgtggacgtttttatatttttattcgtggagttatttttttttttttttttttaaatggggaaattttgatttgaatattgaataaataatatattttcgaaattagcgaagaggtattggttttgaaattttgttatgaaagtttgaaaatgttttttggatcgatttgttggaatagacgggtgtgatggggttgcggggttttaggtggtaggaggcgttttcgtgtttagggtatttcgatgtttagagttttttcgtgtttagtgtgtttttgtatttagggtatttttatgtttagggtgttttcgtgtttagtgtgtttttgtatttagggtatttttatgtttagggttttttcgtgtttagggtgtttttgtatttagagtatttttatgtttagggtgttttcgtatttagggtgttttcgtttttagggcgttttgtgtttagggtgttttcgtgtttagtgtgtttttgtatttagggcgtttttatgtttagggtgtttttatgtttaggtattgtttttttttatttttttaatttttttttattaataggtgttagttgtgaaatgtttgttgtgtgtgttttttggttgagtttattttgtgtttttaagtttttgttagatataggtaggttgttttagtttttttggtaaatgttttgttgttgttgtttgatacggggttttatttcgttatttaggttggagtgtagtggcgttatttcgttttattgtaattttcgttttttaggtttaagcgatttttttgttttagttttttaaatagttgggatgataggcgttcgttattatgtttggttaatttttgtatttttagtagagatggggttttattatgttggttaggttggtttcgattttttgattttaagtgatttatttagtttggttttttaaagtgttgggattataggtatgagttatcgtgtttggttcgtttggtgaatgtttattgaggtttattatgtgtagttttttttttaggtgtttggtttgtaatgaggagtaataaagatatagtcgttggtcgtttgttatttaatagttggaattgagaggtagtttataaatgagtaaatttataggtggttttagatgaggattgtgaagaagttaagaataggttgttgggggtgtatatttgtgtgtgtggcgaggggattaatggaagttttttttgagtggtgatattgagttgaagttgtaatgattagaaggatttagttaggttaaaatttaagggaagagtaatttggtaaaggaaatagtaggtgtgaaggttcgaggttggagtttggggaaggtgggagtggttggagtgtgtttttagagacgggttatggtgatattaatgcgataggtagggttaggtcgtgtcgggttttggaggttttggtgagggtttgattttatttttattatggtgggattttagtgttttgtggttgttgagaatggttaggggtaggtagggaggtttgttagggaggaggttgttgtaggttttgtagttggagagggaggattaggatttttttagagaggaagttggagagggaggatttttttgattgttggatggatttatttgtttggttgttttcgttagtatttagtagaggttattggatgttgataggtggtcggttttgtttagttttgtattgttttgtgttgttttggtggttgtcggttttaggaggagcgtttttggtgtttgagtttagtggttttggttgtggtttggtatatttggtcgtgggtgaggttaaggtggtttggattttgggaaggttgggtatttggtagttttaaggtaggagttggggtgttggaggaggaagtacgtttatttttcgtttttttttgtttcgtgggatgttgagtttttgggtagggatatggtgagttttggtgtgatgtatttaatatttgttggtgtttttatttttaagtaggaattttggtgtttggtgtttgaggattgttgtttatcgttttattattttttaggtttttttttagtttttgattcggggtaaggtttagatatttagaatatttttggttggtttttggagttggggtgaggtagaattttttttttatatttatagtattagttaaggtttcggggtttggatattatttttgggaggggtgagtaggataagtgaggtttttagatttggggtggtttcggattggttaggtaggtgggtgggggttgtagtttatgttttcgttttaggtaatatagtcgagttgtagttttcgttttatttttagttggggttttttgtgtttattttttgttttttttttttttttcggaatggggggtggatattttaagattagttttttagttattttttttgttttttgttttttttttttcgggatagatttttgtgatcgttgggtgtttttgatgttttgttttttttgcgttttgtgtcgtgggtgagagagggtttcggggggattttttttttttggagtatttgttgtttcgggtgtttttgggggcgggtttttattttatattgtggagttggtgtaggaaggaaggtgtcgggagttagttttaatttacgtgttggttgtggtttttaaggtgtggatggtaggaggtggtgagatagggatttattgattatgggattgatatttttttatgttgatgtgggttttgagttataattttattagtttttgagttttggcgttgtttttggcgatggcgtggatttagttaggttttcgggtagttttttttggatttttttttcgtttttttttgggtagtgtttttgtttatttggaaaggatgggtaggatttggagataatagggatttaaagaagtcgggagtgggggtatttgtgtagtttattttgtagaatagataatttggttaaagtttaaagtttgttgttaggagtttcgtttgttttttagagagtatatggtttgattattacggggattgggggagaggtataggtatgtttgttcggtagtagaagggaatttcgggtttgggtttttttattttgtggcgttgtttttttttagagttgtattgttttttttattgtttttgtttggttttagtgtttatgtggtttgtggtttttagtttgggtttggtttttcgtaatttattttgtttagttttatatagtttgtttttttagttgggaatcggagtttatttggagttttaggtagtagattcgatgtagtgatgtagggttgttagttatgttagtaggttttgttgtttatagagggatgggtattgttgttgataataattaaagaattacggttttaggttgggtatagtggtttatatttgtaattttagaattttgggaggtcgaggtaggagaattaattgaatttaggagttttagattaggttgggtaatatagtaaggttttgtttttataaaaaataaaaaataataataataataaaaattatagttttagaatgattgattttagtatgtttataaagttaagggtttttagtgttttgggtttatgttattgcgttagagggagagaggaagaggttggggtgatgggtattggggtttatgttttttttggaatgggtggttttggattgtgtttgtgtgatatgtttgtcgagcgggggcggtgtttattgaggattggatgttgaggtgtgggtggggggaggttatgaagtattgggtatttttcgtgtattagtgtttcgagattgtagagaggggattcgtttagtttgggtagggaggcgggtggtagcgaggaaggggagaggaattcgggtgtagaaagttttttttttagtaggtggcgtcgtaagttttcgagagtttagtttttgcggggtttgtatttttattgaatttgtgggtagaggttgtttgggtgtagttttcgttaattgtgattgtttattgcgggcgaggggaagtggagtgtagagaatgtatcggagggtagatgattagttttcgtataggtacgggggtgttttttttttcgtataggtacggggggttcgagtttttggggtttttgttttaattgggcggggaaagggagggttggaagttgagttagggggaaagggggtggttttttgttattttttttattttattttttttatttttggttgataggttttaattttttttatatttttttaattttttgtcgtaaaattttttaaatatagaaaagatgaaagagggttgagtgtggtggtttatgattgtaattttagtattttgggaggttgaggtaggaggattatttgagtttaggagtttaagattagttcgggtaatatagtgagattttatttttataaaggatataaaaaattagttaggtatggtggtgtaggtttggagttttagttattcggaaggttgaggtgagaggattgtttgaatttgggaggttgaggttgtagtgagttgggattgtgttaatgtattttagtttgggcgatagaataaaattttgttttaaaaataaaataaaataaaattataaaaaagaaattatgaaagattttaaagtaaatatttatgtatttattatttagattttatagtaattattttgttgtttgttttattataaatttttttggttattagtatttacgttggttttgatgtatttaaaataagttgtagaaattagtatataatattttgttaatattttagtttgtattttattaattagagttcggtatttgtttgtgattatttttgtttttttttgaagtaaaatgtatatattttgagatgtataggtgtgaaacgtttcgttttttgaattttaataaaggtatttacgtgtattttagtttgattagaatatagaatattattattattttagtaagttttttatgtttttttaggtgtattatagtttttattttttttagggtaattataattgtgttttttttttattacgaaataattttgttagtttgagtgttttttagagttatttatgttgttgtaggtgttagcgatttgttttgttttattgttgagtaacgtttattgtgtgaatattttgtgggtttttagttatttttttgttgaaagatttttggttgtttttatttggaggtttttatgagtaaatttgttacgttggttttttttgtataagtttttttgtgtatatgggcgtttatttattttgtagaaatatttagagtaggtatagggtaggtatatatttagttttataagaaattgttagatttttttttaaagtggtttttttattttatatttttattagtaatggatacgagttttagttgttttatattttggttaatatttggtgttgttattttgtgaaattttagttattttggtgggcgtgtagtggtattattttattatggttttaatttgttttggtttgatgattaatgcggttgagtatatttttatgattggttttttatatattttttttttgtgaaatgtttttttaaatttgttgtttattttaaaattgggttgtttgatttttttttttggatattgattttttgttagatacgtgttttataaatattttattttagtttgtggtttgtttgtttattttttttttttttttaagaataaggtttcgttgtattgtttaagtaggtttgaaatttttgggtttaagttgtttttttgtttttgtttttttaagagtcggttttataggtatgagttattatgttcggtttgtttatttttttagtggtattttttaataagtaaaagtgtgttattttaatttttatgaagtttaatttaataaatttttttttttgtggttttttttttgtgttttttgtaagaaatttttgtttattttgttaaattgtaaagatatttatgtttttttttagaaggtttagagttatatagtttttatgaattaatttttgtatatggtgtgaggtagagggttagggtttattttgttgtcgttttatgtgtttatttagttgttttaaattttatttttttttaaagtttttattttgtatttttttggtgatttatgaggtcgtataattttttaagatttttgttggttatttacgtatttttttttgtaaaattatttgtttacgttttatttttttttaaaattatgttgttttaagatcgagtgatttttgaagtttttattttataatgtttgaaagaatgaatattttgttttttagttataggtttttgttttttgttttgtagttgtatagtggggtaagatttgggttttgttttgttgttgttttgttgtttttttatttgattgtttttttatgggttttatttaaaaaaaaaattggtcgggtatagtggtttacgtttgtaattttagtattttgggaggtcgaggcgggtagattacgaggttaggagattaagattattttggttaatacggtgaaattttatttttattaaaaatataaaaaattagtcgggcgtggtggcgggcgtttgtagttttagataatcgggaggtcgaggtaggaaaatggtgtgaatttgggaggcggagtttgtagtgagtcgagattgtattattgtattttagtttaggtgatagagtaagattttgttttaaaaaaaaaaaaaaaaaaaaatgttgttttatatgttttttatatattttggatataagttttttattagatatatgtattataagtttttttttttatattgtttttttttttttggtttttttaatgatgttatttaatgagtaagagtattttgtttttataaagtttaatttattaattttttttagtttcgatttatgatttttgtgatttatggaggaaatttttgtttatattaaggttaaaagaagtttttttattttttagaaattttatagttgtatattttatgattttttttattttttaattttttaaatttttatattttttaatttattatagtcgttaggatgttgtatgatttattttaaattagtttttgtatttggtttgaggttagggttaatttttgtttttttatatttatatttagttttagtatcgtttgttgaaaagatatattttattttattgaattatttgatatttttgttaaaaattattgattgtatatgtggttttatattagtatatgtacgtatatatatgtaggttttgtgttgattgtatgtgtggttttatattagtatatgtacgtatatatatattggttttatgttgattgtatatgtggttttgtattagtatatatatattagttttatattgattgtatatgtggttttgtattagtatatgtatatatatatatgtaggttttatgttgattgtatatgtggttttatattagtatatgtatatttatatatgtaggttttgtgttgattgtatatgtggttttgtattagtatatgtatatatatatatataggtttcgtgttgattgtatatgtggttttgtattagtatatgtatatatatatatgtaggttttatgttgattgtatatgtggttttgtattagtatatgtatatatatatatataggtttcgtgttgattgtatatgtggttttgtattagtatatgtatatatatatatgtaggttttatgttgattgtatatgtggttttgtattagtatatgtatatatatatatgtaggttttatgttgattgtatatgtagttttatattagtatatgtatatatatatatgtaggttttatgttgattgtatatgtagttttatattagtatatgtatatatatatatgtaggttttatgttgattgtatatgtggttttgtattagtatatgtatatatatatatgtaggttttatgttgattgtatatgtggttttgtattagtatatgtatatatatatatgtaggttttatgttgattgtatatgtggttttgtattagtatatgtatatatatatatgtaggttttatgttgattgtatatgtggttttgtattagtatatgtatatatatatatgtaggttttatgttgattgtatatatatatgtggttttgtattagtatatgtatatatatatatgtaggtttcgtgttgattgtatatgtggttttgtattagtatatgtatatatatatatgtaggttttatgttgattgtatatgtggttttatattagtatatgtattgtatatatgtaggttttatgttgattgtatatgtggttttatattagtatatgtattgtatatatgtaggttttgtgttgagatattattgtgtttttttgatattttgtttatttttttgttgatgttatattttgattaatgtggttttatagtaagttttaatataaagttttttaaatatttaaaatattattttgaatattttaggttttttgagtttttttataaatttaagaagtagtttgttgatgtttataaaaatgtagtgtgaattttggttgagattgtgttgaatttgtagattaattaaggaagaattggtattttaataatattgagttttttgtatagatggtatattttcgttttaaaggtttttttgtattttttttatttttttattgaaaaaaaatttttatagaattatattgttttgtagtttttaagaaaaagattttgtatgttatttgttaaatttatttttaagaattttatttttggtattattttaagttgaaatagattttaaattttatttttaattatttgttgttagtatgtaaaaatataatagatttttgtatgtaaattttatattttatgattttttttaaagttatttattattttggtaatggttttgtaggttttttaggatttaaatatatagttttatttttttttgattttgatgttttgttttttttttttgttttattgtattggttagagttgttagtttagtattgaatagtagtgattagtggatatttttgtttgtgttaaatttataatgttaattttagatttgttatatatgatttttgttagattgaggaaatttttttttatttttaatttgttgaaattttttaatatgaatgggtatgattttagtaaatgttttttttgtatttatggaaatgattattgttttgttttttattcgtttaataggataaattataatgattgatttttgtttttcgttttttttttttttttttttaaagaaatagagttttatttttgtttaggttgtagtatagtggtgttatcgtagtttattgtagtttgaatttttggatttaagtaatttttttattttagttttttaagtagtagggattataggtatatgttattatgttaagttaatttttaatttttaaaattttttgtatagatggggttttattgtgttgtttaggttggtttgtaatttttgagtttaagtaatatttttatttttgttttttaaagtgttgagattataggtgtgagttattgtgtaggtttgattttttaatattgaattaattttgtatttttggaagaagtttaatttgtttatgagatattattttttttatatattgttaaatttgatttgtttagtttttaaggatttttgcgtgttgatttatgagggatattggtgtggtattttttttgtttgttagtttgtttcggtaatgtttttgttagttttattttggttttataaaattagtttggaagtgtttttttttttttgttttttgtgtttttataaggttgatgttgttttttttttaaatgtttgatagaatttattaagaaaatcgtttggatttagaattttttattaggaaaggtgattgtttgtttttaattataaatttaatttaatgtatagaaagagttatttaggtttttttatttttttttgttttatttttggtaagttgtattttgaaggaatttgttttttttaggtaagttgttgaatttatttatttaaagttgttcgtaatataagtatatttagggtttgtttttagatttcggtaataaagtaaatattgtaataaagtacgttatataaattttttggttttttagtatatataaaagttatgtttaggttaggtatggtggtttatgtttgtaattttagttttttgggaggttaaggtgggcggattatttgaggttaggagtttgagaatagtttggttaatatggtgaaattttatttttattagaaatataaaaattagttgggtgtggtggtatatgtttgtagttttagttgtttgggaggttgaggtgggagaattgttcgaatttgggaggtggaggttgcggtgagttgagattatattattgtattttagattgggtgatagggcgagattttattttaaaaaaaaaagaaaaaagttatgtttatattatattatagtttattaaagtgtataagattattatgtttttttgttaaaaaatgttaataattatttgagtttttagtaagttataattttttttttggtagaaggtttgttttaatgttgatggttgttgattaggtggtggttgttgaaagttgaaggtagttgtggtagtagtttttttgttttttttttttttttttttttttttgagatagagttttgttttattgtttaggttggagtgtagtggtacgattttagtttattgtaatttttgtttttcgggtttaagtaatttttttgttttagtttttcgagtagttgggattataggtgtttgttattacgtttggttaatttttgtatttttagtagagatagggttttattttgttggttaggttggttttaaatttttgattttaggtgatttatttgttttggttttttaaagtgttgggattataggcgtgagttattgtatttggtcggtagttttttaattgaagtttttgatatgggttgatttttttttttatgaaagatttttttgtggtacgtattatgtttgatagtattttatttataatagagttttttttaaaattagagttaatttttttaattttggttacggattgattaaataagttgatgtaatattttaaattttttgttgttattttaataatgtttatagtattttcgtttggagtagattttatttttaggaattattttgtttgtttatttataagaagtaattttttatttgtttaagtttgattatgggattgtagtaatttagttttatttttaggttttatttttaattttagttttttgttatttttattatatttgtagtgattttttttgttgaagttttaaatcgtttatttatgagggttggaattaattttttttaaatttttgttaatgttgatattttaatttttttttgtgaattataagtgtttttaatggtatttagaatggggaattttttttagaaggtttttaatttattttgtttagatttattagaggaattattaattatggtagatattgttttataaaatatattttttaaataataagatttgaaaattaaatttattttttttttatgggttgtagaatgggtgttatattagtaggtatgaaaataatatttatttttatatatattttcgttagagtttttgggttataaggtgtattgttaatgagtaataatattttgaaaggattttttttttttgagtagtaggttttaatgatttttttttttttttgatggagtttcgttgtgttatttagaatggaatgcggtggtatgatttcggtttattgtaatttttgtttttcgggtttaagtgatttttgtgttttagttttttgagtagttgggattataggtatatattattatgtttggttagtttttgtattttttgtagaaatagggttttattatgttggttaggttggtttcgaatttttgattttaggtgatttatttgttttagttttttaaagtattgggattataggtatgagttattgtatcgggttttatttgttttttttttgttgttgttttttaattgagatagagtttcgttttgttgtttagattggagtgtagtagcgttattttagtttatcgtagttttcgttttttaggtttaagtgatttttttgttttagttttttgagtagttgggattgtaggtgtgtattattatgtttggttaatttttgtatttttaatagagatgaggttttattattatgttggttaggttggttttgaatttttgaatttaggtgatttgtttgttttggttttttaaaatgttgggattatagttgtgagttatcgtgtttggtttttttttgtttttttgtttttttttaaattgagatagagtttttttttgttgtttaggttggagtatagtggtacgatttcggtttattgtaattttcgttttttgggtttaagcggtttttttgttttagttttttaagtagttggaattataggcgtgtgatattatgtttgaataatttttgtatttttagtagagatgcggttttattatgttggttaggttggtttcgaatttttgattttaagtgattttttcgttttagtttttaaaagtgttgggattataggcgtgagttgtcgtattaggttttaatgggtttttaatatttagtaaattatgttgtaaatagatgtgttgttaagtagggtttgttattttatttttgaagtatagatagaatagatttggtagaatttttaagggttttaggatttttggaacggttaatgagtattggttttaatttacggttaatagttgcgttagttttttatgagagttagtttgttttttgaagttttaaagataggtattgattttttttttttagttatgaaaattttagatgatatttttttttagtagaaggtgggatatttatgttgaaattttgttgtttagtgtagttatttttattagtgttttgagttagattttttgggtaatttgttgtcgtttttttattagtatttgttgttttattttgtatttttatattatagagatggtttttttttttaaattttatgatttgatttttgttagttttaaattttttttttttagtttttttattttttttagtttttatattattgaagagagttagggttttgttttggattaggtttttgtttaagggaatgttgtggttgatttgattttttatttagattatttaaattttttttatattagtattaaggttgttttgttttttttttttttatgtgtgtattggaatcgtatttttaattttttttaataatttttttttggtatttataatttggttagttatttggtataagagattttatttttgtttgttttggttttcgatacgttttttttatttagtttaattatttttagtttttgatttaaagtgagagacgggtgatttttttttttatttgaatatttagaggttattgtagggttattaattggtttaattttaatattgttgagttttagggaatagggatgtttgagtagagggagagagagcggggaatagttagttagtggagtagttagaatatataacgtttattgaataagtttattgttttatttggatgtggttcgttatgttttaaaaataattgtaataatggtattgaagattattgattattgggcgcggtggtttatgtttgtaattttagtattttgggaggtcgaggtaggtggattatttgaggttaggagtttgagattagtttggttaatatggtgaaatttcgtttttattaaaaatattaaaattagttaggcgtggtggcgggtgtttgtagttttagttattggggaagttggggtagaagagtcgtttgaatttgggaggtggaggttgtagtgagtcgagattatattattgtattttattgtattttagtttgggtaatagagcgagattttattttaaaaaaaaaaaaaaagggtcgggcgtagtggtttacgtttgtaattttagtattttgggaggtcgaggcgggtagattatgaggttaggggattgagattattttggttaatacgatgaaatttcgtttttattaaagatacgaaaaaaatagtcgggcgtggtggtgggtgtttgtagttttagttattcgggaggttgaggtaggagaatggcgtgaattcgggaggcggagtttgtagtgagtcgagatcgcgtcgttgtattttagatagagtaagattttgttttaaaaaaaaaaaaataaagaaagaaaaaagaaaaaagagattatagattattatagtagatataataataatgaaaaagtttgaattattttaagaattattaaatttttatatagagatatagtgttaatatgttgttggaaaaatggtgttagtagatttatttgatgtagggttgttacgaatttttaatttgtaaaaagtgtagtatttgtgaagtataatgaaatgaggtgtgtttgtgttttttgttattgtaatgtcggtaggattcgtaaggaaaatattttattttttttattgtgattttatgttcgttattttttttttattagtagtttggttaggaggttattaatttagatttttttaaagaattagtattggattttttttttttggtgtttatttttttgagtttttttgttatttttattatttttttttttgtatttgttttagcgtattagttagggtttagttaggaaataaaaattatatcggtaatttgaatagtaatttgtaatataaagtgtttttaattgtaagaggtagttaattattaaagggattataaaggggtgatattgtgatataagaaagatgtatttgggttgggttcggtgtagtggtttatgtttgtaattttagtattttgggaggttgaggtaggcggattttttgagtttaggagtttgagattagtttgggtaatatggtgaaattttatgtttattaaaaatataaaaaattattttggcgtggcggtgtgtgtttgcggttttagttatttgggaggttgaggtgagaggatagtttgagttcgggaaggtagacgttgtggtgagtcgagattgtattattgtattttagtttggatgatagagggagattttgttttaaaaattaatgtatttgtttgtttgtttgtttatttatttatttatttatttatttatttatttatttagtttttgttttttaattttgtttggtatgtagtttttaaaatttttgaaatttttaaagtgatgggtgtttttttgtttgttaaggaggcgattggtggttggaggtttttggatagtttggggataagggttggttgttaggggatttagttttgtgattagaaggttagaatttgtagttttttttatttattttttgcgaggtaagaggggatgaaggttgagttgattattaatggttaaagattttatgttatgtttatgtagtgaagtttttttgaaaatttaaaaggatgaggtttgtagagttttaggttgttgaatatttgtaggtgttgggagggtagtgtattttttcgtggaagttttatgtcgttttttttatattttttttatgtattttttttagttggttgtttatttgtattttttgaaatattatttgtaataagttagtaattttaagtaaattgattttttgggttttgtgagttatttaagtaaattattgaatttgagaagggagttgtgaagattttaaatttgtagttaagttagatagaagttatgggtaatttggtgttttattatttgcgattgatttttgaagttgagggtagttttgtgagatggaatttttaatttatgggatttgtattaattttggttggtgttagaattgaattgaattgtaggatatttagttggggattgttgagtattggagaattgtttgggggtcggcgggaggaaattatatatttggtgttagagttgaagtattgagtgttgtgaatgagagtggagagatagagtttgttttgttttatgtaagaggattttaaggagtatagaaagagtaaatatgagaagtagttattttagaagaaaatataggaggaaagtttcgtgatattggagttggtaatgtttttttggatgtgatatcgaaaatataataaaagaaataaatgataaattggattttattaaaatttaaaatttttgtgtattaaggaatattattaatggcgtgaaaaggaaatttatagaatggaagaaagtatttgaaaatcgtatattcgataaaggattagtatttagaatatataaagaatttttataattaagttataaaataaaaaaaaataatttagtgaatagatatttttttatagaagatatattaatggttaagaagtataggaagagatgcgtagtgttattaattattagggaaatgaaaattaaagttataataaaatatgattttatattttttaaggtggttgttagttaaaatatggataatagtaagtgttggtaaggatatggagaaattggagtttcgtgtattgttggtgggaatgtaaaatggtgtagttgttgtggaaaagatataataattgtttaaaaaattaaatttagaatgattataatatttagtgattttatttttagatgtatattttaaagaattgatagtagggatttgaataggtgtgttatatttttgtttgtagtagtattttttttataattaaaagatgtaggtaatttaggtgtttattagcggatgaatgaatagataaaatgtggtttatttgtatagtggaatattattttgttttaaaaaggaaggagaggttaggtgtggtggtttacgtttgtaattttagcgttttggaaggtcgaggtgggtagattatttgaggttaggagtttgagattagtttggttagtatggcgaaattttgtttttgttaaaaatataaaaattagttaggtatgggggtatgtgtttgtaattttagttattagggaggttgaggtaggagaatcgtttgaattagggaggtggaggttgtagtgagtcgagattatgttattgtattttagtttgggcgatagagtaagattgttttaaaaaaaaaaaaaaaaaaaaaaaaaaaggagattttgatatatgttatagtatagatgagttttgaagatatgttaagtgatagaagttagatatgaaaagataaatattgtatgattttatttttatgaggtttttagagtagttaaatttagagagatagaaagtgggatggaggttgttagaggttgggggaagggagaatgaatgggaagttggtgtttaatggggatagaattgtagtttgggaagatgagatggatggtggtgatggttatataatagtgtgaatgtgttttatgttattaaattgtatatttgaaaatggttaaaatggtaaattttttgtgatggatattttaaggtatgtatgtaaatatatagaagtagttattattattggggttgatggaaaagaaattaagaattcggagcgttttttatattttgttacgttttacgtttaggttttgttggagagtgtgtgattgttatagaaatttgtagtttattggtaataaaaaggtttttgttagaaggtgtagaaagagtggatttgtaggattagtttattgggtagtcgagaaatttattagagggtatgggtgggtaggagttgggtgtttgagaagtttgttgaggttttattgggttagagttggggtgttggagaaatttagtatagagtaggttttattgggtatacgttattggtagttgtgtttttagaggaaaaagagattttggaattaggaagagaagttgttattttagtaaggtttggtagttttttatagtgttgttttttgtggatagagtttgatatgattgtatttggttaaggagaaagatttataaggtttcggtttagtattacggagcggggtttggtaggatgtatgtagagttaagaggtaatatatgggtaattggtatatttttttagattttttgttttttttgttgttttgttttgttttgttttgttttgttttgttttgagagagtattttgttttgttgtttaggttggagtgtagtggtatgatttaggtttattgtaatttttatttttcgggtttaagttatttttttgttttagttttttaagtagttggagatgtttattatgtttagttaatttttgtatttttagtagagatagggttttattatgttggttaggttggttttgaatttttgattttaggtgatttatttgttttggttttttaaagtgttgggattataggcgtgagttatattgtatttggtttatttttttagatttttaaagtagatttttaggtttttttttttttttttttttttttttttttattttttttttaatataagtatttatagtttttttttaagtattagttttagtttacgtattttagtatgttgtgtttttattattattttatttgaaatattgtaaaattttttttgtgattttttttttgatttatgggttatttagaagtatgttgtttaatttgtaaatagttaaggtttttttgagtattttagagttattgatttttaatttaattttattttggttagataagtatattttgtatgtttttaaaatttgagatttatggtttagaatgtgtattttggtgaatgtattgtttttatttgagaaaaaaatatgtatatatattttagattttttgagtatagagttttataattgttgattaggttaattgttagttattagtgttttttagattatttgatgtttgttttttagatgttgagagaatggtgtttgttatggtttatttgtttgtgttttttaaaatttatatgttggagtttaatttttggtgtagtggtgttgggaattggggtattagggaagtattggtttatgagggtagagttatcgtgaatgggattagttttttttgttatgtggggatatagtaggaaaaggatatttttgaagtagggagttagtttttattagatattgagtattttgattttggattttttagtttttagaattgtgagtattataatttgtttataaattatttagtttaaggtattttgttttaatattttgaatgaattgaggtggtgttaaaatttttaattatgtatttaggcgtagtggtttatatttgtaattttagtattttaggaggttaaggcgggtggattatttgaggttaggagtttgagattagtttggataatatggtgaaattttgtttttattaaaaatataaaaattagttgggcgtggtggtaggtttttgtaattttagttattcgggaggttgaggtaggagaatcgtttgaatttaggaggtggaggttgtagtgagtcgagattgtattattgtattttagtttgggtaataagagtgaaatttcgttttaaaaaaaaaaaaaaagagtttttatttatgattgtggaattgtttatttttttttttaatttttttaggttttatattatgtattttgaagtttttttggttaggtgtatatatatttatgattataatggtgtttcgatgaattgattatttaattatgatgaatgtatttttttatttcgtaataattttattttggatttaattttattgatatttatgtagtttttttagtttttttaaatatgttgtttgggatgtataagaaggttggagaggtttatggagaaatttatgatggtttgatttatagttttttaattttattatggtgcgaacgtggtatgtatatagtagaaattgtattttaagtatgtgtgaaattattgtgttttttatttttagtatagtatttaataatttatatgagatagttaatattttattataaaataggttttgtgtttgttgattttgtttaattgtaggttgaagtaagtgttttaattatgttaaggtaggttaggttaagttagaatgttcggtaagttagatgtattaagtgtatttttgagatgatatttattttttatttatgatgggtttgttaagatataattttattattatttaagtagtattagtatgtttttttttaaatagaaaattttaatttgtgtttatattgaaatagtattttttgtagatagtatatagttgagttttgttattttatttattttgatagttttcgttttttaattggaatatttaggttatttttgtttaatatagttatagatatgattgggtttagagttattattttgttttttgatatttattttttttattttgtttttttggttttttttatgttaattaagtattttttagaattttattttaatttatgttttttttttttttttttttttaagatagagttttattttgttgtttaggttggagtgtaatagtatgattttggtttattgtaatttttgttttttgggtttaagtgatttttttgttttagtttttttagtatattgggattatagacgtttgttattacggtcggttaatttttgtatttttagtaaagacggggttttattatgttggttaggttggtttcgaatttttgattttaggcgattcgtttattttggttttttaaagtgttgggattataagcgtgagttattgagttcggtttgttttgattttttaattgtatttttttgtattgttattttagtagttattttatagattttattgtatatttttagttttttatagtttatttagaattaatattgtttttttttatggaaaaaaagtgtaagaattaggtaattttatgggtttatttattattttttattttgtatgtgatggttgttagatatttattatatttatatatattgtaaattagataatataataaggaaatttttgttttaaatagttttatgtattttaaagaaattaaaagtaaaatagaattttttttatttgtttatgtatttgttatattttgtgttttttatttttttttgaagagttgagtttttatttggttttattttttatgattttggagaatttgttttacggtttttgtagtgtaggtttgtagatagttaatttttttttatttttatttatttgtaaatttttattttgttgttattttttttttttttatttttatttttatttttgagatagagttttattttgtttttttataggttatagtgtaatggtgtgattttaaaatttttgtttaattttaatttattaatttttttttttcgggtttaaacgatttttttgttttagttttttaagtagttgggattataggtatgtgttattatatttagttaatttttgtatttttagtagagatgggattttattatgatggttaggttggtttcgaatttttgattttaagtgatttgtttgttttggttttttaaaatgttgggattataggtgtgagttattgtgtttagtttgttgttatttttgaattataattttattggttatagaattttgagttgttagtttttttttttaggattttaaaatatagggttttagtgtttttggttttcgttgtttttgttaaggaattagtatttatttagttatttttttgtagattatatgttgtttttttttggatgtttttaagattttttatttaagtttgattgtttagtatttatttttgggtaaaaaagtttttagaaattagaaatttatttagttttatttttttttgttaggtgtagattttattttagtttttatttatttgagatattttatattgattttaggttgttgttattttgtttttttaaatattttgtttagagttataatgttttttgtagaattgattagatagtagttattttttgtgattaggagttttgattttttagatttgttgatgggtttataaagtttttgttcgtggtttttagttggtagtggtttttttgttttgaagttgttatgagtgtgtaaaatttataggtttaattttttttattagtatagtttagaaaagtggaatttttggtttgggtggttatggtgttttagattattggttagattagggtggtgattgttagttggtcgaatgtggggtttttagtttagtatttttggattttattttaggagttatggttgttttagggttaggggtttggttttagtttttgtttttttttttttttttttaagttgtttagtattaggttttaattagtattttttgtagatagggtgggtcggttttttattagaggggtagggttgggcgggaagtttgttgagtttttttttttgtgtagtttatagttttggggttagttttagaggggtgtagaaaggagtttttaaaggtagaaatttatttttttttttgtttttgtgtttttagggataaaggagaggtggttttagttggggggttattagtggtatgtaggaggtttatatgattattgtttgttggggtttttttttttttgtgagagagacgagagagaggagagagagtgtgagttagggtagtgtttttttttagtaacgtagatttttgtacgtgttttttaggagaaatttcgttattcgttagagttttagatttggaagaagttttgtttttttttttttttttagtgtagtgtgtgtgtgtgtgtgtgtgtgtgtgtttttatatgtattatatttttttatagaggaaataattttcgtttaagtgtaaaggttgggattggagtaggtagtatgtgggttaaaggagtagagaggaggaaacgggggcgggggtgagggtgggaataggaggtgggtagatgttacgaggtatgttttttataattagaagggttggtggagatgattagaatgttttagatagattttttattaaatttttaaaatttaattttgttttatgaagtttgaggattttgtagagtgaaagataaggaagggtttttttgtaggggggtgtgtgtgtttgtgtgtgtttgtgtgttgtgtgtttttatgtgtgtgtacgtgtggatttgtgtggtgtgtgtttgtatatgtgtgtacgtgtggatttgtgtggtgtgtgttgagtgtgtatatgtgtgtgtttgtgtgttgtgtatgtatttgtatatgtgtatatagattttattttttttttttttggtttattaagtgttagaaagaattttcgtgagtttttttattttttttaaggttgtatatggagggatttgcgtaggtatatgtgcgcgtgtatataatatatatatatatatatatatatatatatatatatatatacgagttaggggcgagtatttttgtggattgtatttaggtttggtaggaaatcgggttttgggaaattgtaggttttatttttggtagaaaattatgtttttgttgttgttcgttgaagggaatattaagtggggttggggatagtttatgttgagaagagtaaattttgtttatggtattggggatattgagtggtttttgtttcgggttttggagggtttgggagatacgtttgtagttttgggtattttttaaggttacgggcggttatatttaaggttaggtttttttttgtgtgagttgcggttagtaggaaggttgattttagaggcggttttagggtttttggaggttttgtttttgagatatgggttaaggttagagagtcgagaaggttgttgttgaggattttggttggcgtttagtttagcggttttttaggcgggttttgtgtaggggttgatgaagttagttgggaaatttgtgaaataaagtataggttttttaggtttgtttagagtttcggtattagatgaggtgtagagaagggaattgagttgttaagtgtgaataggagagaggagttttaggattatataggggtttcgatatggtaggtgtttggttagtagcggtgttgtttttattgttggacgtgggaaaatgtattgatatttgttgattagagtcggggtgagtatttgggtgattttgtagatgagataaaataagggttgtcgtgggggaggggtttttgtcgggttattttgttgaggttttgtgttattgttttgcggttgttataataaaggattataaatgaggtgatttaaaatattcgaaatcggttacgtgcggtggtttatgtttgtaattttagtattttgggaggtcgaggcggttggattacgaggttaggagatcgagattattttggttaatatggtgaaatttcgtttttattaaaaatataaaaaaaaaaaaaaaattagtcgggcgtggtggtgggtgtttgtagttttagttgtttaggaggttgaggtaggagaatggtatgaattttggaggtggaggttgtagtgagtcgagatcgcgttattgtattttagtttgggtgatagagtaagatttcgttttaaaaataaaaataaaaataaaaataaaaatattcgaaatgttttttttaaagtttttggagttagaaattttagatcgaggtgtttgaaggtttattttttttgggggtttcgagggagattgttttatgttttttttcgagttttgcggcggttagtaatttttggtatttttcggtttgtagttcggtttattttttatttggtttttattttgtgtttttttttgtgtttttgtttaaattgttttttttgttgtttttttaatttatttttagggataggtttttattttgttttttaggttggagtgtagtggcgtgattatggtttattgtagttttagttttttaggtttaagtaatttttttattttagttttttaagtagttgggatataggcgtacgttattatgtttggttaattttttaatttttttgtagagacgagggtttaggttggttttaaatttttgcgtttaggtaatgagattttgttttttaaaatattgggattagagatatgagttgttgtgtttagtttatttttgttttataaagatatttgttattggatttagggtttattttgatttaatatgtttttaaataatttaattatatttttaaagattttatgtttatataaagttatatttataggtattggggggttaggatttgtatatgttttttgggggaatataatttaatttataatgggttttatttatagaacgaacggtttttttagggtgtgcgtaggtgggtgaggggtttaggagagggatttgcgtggtaagagggtttgtgtttacgttagagattttagaaggagattggatggggtggttgtatggagtaaggggttatagttattgtttttaagtagttggtgggttgtttggtagaaagggagtatttattttgagtttttttaagatatgaagttagtattaggtatttggaaggtgttagcgagtagagtttgattttttatagaaagaggtgttttttttataatgtttatttgaggacggtggaataggttattttataaggtagtgagttttttatgtttggaagtatttaagtaggggttatgtgggagttgtttaggagtgtatagaagggattttagaggtttttgttaatattatttttgtttgttttattttacgataatttgaattttagaatgtaatgttattggggatatgtttattagaggggtttttagtattaggttttatatattatgtattatttttagggtagggaatgagagtaggttttattttttttggttgtttgtgaggattaggaggtttgttgttgaggtagttttttgtggaaatagtgttttagtttcgtaatttatttatcggagttttaatattttaatgaaatattgtgttagatgggttttgggtatgtgtgtgtagattgttataagtttatgagaatgtatatacgtatattgtatgtgtgtgtatatatgtatgtatatatgtataagaatacgaagattcgaggtaggtatagttcgtgagatagatttttttaggttgaaagattttttataagggtttttagaataaggttttagtttcggtagttttttttatttttggtgggaggatttttatagagaagaagggttaagaagtatagtttttgatgtttacggtgtattaagttttgttttaagtttgtgttttattttttatttatttagtaaatttgtcgtttttgttttgtgttagatgttgtttttagtattttataaatattgatgtatgtttgttttatgataattttgtgaagtaggtagtgttatttcgttttatagatgaggaaataggcgtagagggataaagggatttgtttaaggtttgtttttattttatacgtatatgaacgtttatttatgcggtaggcgttagtttttttttgatgtgagttaggttttgagttggttggggtttgggttttattttggttgtgttttgttgtgggtattaaggaagtttttagtagttttatttttttggtatgatttagttttagggattggatttttttaaatgtttttgtttagtttggagttttttttttagttgggggagggttgaacgattttttatttttggaggttgtcggagttttttttgtttgtatgcggtcgttgtcgggtggataggtttgtttgtgggttgaggtttttagtagttggggtggattatttttttttttaagaagttttgggagaagtagttgagggggttagcgtttttttgaggttaattttttgttttttttagcgtaggcgcgaagttatttttgtttgtgtgtttgttatagatagtggagggcggtgtaatcgtgacgtttgtttgttgtattttgcgtttttgaggacgttgatttttggtcggtgttgggcgtttgttttttagttattttgttttgatttggcgtggtaggttcgagtattgtttttttataaggaaataggtttagaggttttgagttatttgttcgggtttttttagttaataattggttgagttaggatttttatttagttttgtgattttagaagtttaagttttttttattacgttagggttaggaaaggattagaatgtttttttacgtgtcgattatttggatgatttgtgtagtttagttcgttgtagttgtttaataaaaatgtggaatgaatgggtttatatgttttattgtgtgatttagagttaatgattttggttgatttttttgtttttatttcgtggtttagtatttttttttggggtgtgtgattttggaagtagtgattttttttattttattttgaatggtgtttgcgtcgtagtaggggagtagttggggattgttagcgtttgttgttggtgggttgtgcgttagatttcgttttggatgtgtgggtgattgttagttatatgtgtgtgaagggttgtgcgtgtaggatttgtgtaaatgtgtttttttttgttgttagtttatgggaggttgttaagattttgtttttgtatattagtttatattttttttgtggtttattgttgtggttgtttttttgtgttacgtggttgtaggtatagtttttaagtggatggggatcgtgggttgaatgtgtattagatgtttttgttttttggtgggtggagatttttaatttatgtatcgtggttgtcgtatttgaaaggttttttatggtgaaggatttggatttgagtaatttttcgtagaggttttagaagtgttttttggtcgggcgcggtggtttatatttgtaattttagtattttgggaggtcgaggtgggcggattataaggttaggagatcgagattattttggttaatacggtgaaatttcgtttttattaaaaatataaaaaattagtcgggcgtggtggcgggtgtttgtagttttagttattcgggaggttgaggtaggagaatggcgtgaatttaggaggcggagtttgtagtgagtcgagatcgcgttattgtattttagtttgggcgatagagcgagatttcgttttaaaaaaaaaaaaaaaatgaagtgtttttagtttttttttttgtggtgaggttttgagtttttatttttagaagaaaatttggttggggagggtatttttagattcggatataaacgttaggagattagggttgtttttttaggtgattaattatagagatttagggaaagttacgtttggaagaggcgatattgtgttttagttttatttatttttttattttatagatattgtttggtgtttagttcgtatcgcgaggttttttaagtagttttgggtatcgtgtatttggtatggtttttagttttatttttttgttttgggagattcggtggggatttcgggttgagtttttgtggttgtggaattttggtggtttattgtggtggttgagaatagggacgtggggttggacgggttgagtgtaatttttagtggtttcgtgaattgtttgggagttttgggtagtttttttttattttgtgttttcgttttttgatggaaaaatgggggttaggggggagcgattttgaaggtattcgtgggaattaagcgaggtgataaatgtagtgtttttggtagagaattggatatagagtttatttttatgaagggggttgttttttttttttttatgtttttttttgtttttatttttttttttgtattttttttttttgtttttttttttttttttttttttttttatatgtaggtatattttatttggtgttttaattgtttttttttattgtttttttgtaagtggttttttaagtgggaatttaggtttggaaagggtgggtattttgtttggtgggttttggtaggttaggcgttgagtagttttaggagatataattttaggaaaaggtttatgtaggttggttgttatgacggattgttggtgggagaggggaaggcgtcgtggtaggggaagttttggaaatatttattagtggttttatttatgatttaggatatttgttaggttattagaatatagttgaggaagttgtcggttagacgtttagaagtattaatttggtggttgggttgtggggggatttttttggataggtagataaggtgtcggaggaaggggttgatatttatttagtgtttgttatgtattgagggtataaagggtaggatggagagttggtttacgttatttgtggaattttttaggtgtgggggtagatggggaagtaagggggtttgaagatatatgcgtttattaaatgtttttaaattttaagaagaagaataaggatatatttataggggtagggttgaaagtttgatgtatggtgttttggggtttgtttttgttgtaatagttatagtggtttttttttattttttttttttttttattttgttgtgaaaatgtttaaaatatatggttaagttgaaagtattttatagggaatatatttagttattatttagattttattattaatattaagttatatttgttttattattttatcgtttatttatttttttttcgtttggttatgaatttattttatttttattttttggtgtattttaaagtaattttaggttattttgattatttttggaattattgttagaaatttttttttttttttttttttttttttttttttttttttttgagatgggattttgttaggttatttaggttgaagtgcggtggtgtagttatagtatattgtagtttttaattttcgagtttaagtaatttttttgttttagttttttgagtagttgggatcgtaggtatttattattatatttagttttatttttaaaattttttattaattttttattttttgtatttatttaggattattttttataaagttagggtgttgtaggaggggttagaattttaagttttaattttggttttgttattaatattgtgcgatttttagtaaattattttgtttgtttaggttttgtttttatttttatgaaacgagggcgttaaattgtatgttataaataatgagggttattagttattaagtttttattttaggttaggtattttttatatgttattatgagtttttttaatttaggtattgtttttaatggatagtttagttaacggaagtttagagaggtggtgtaatttgttaaaagttttattatttagtgaatgtttttacggggtttgtatttaggagtttgatatagagtttaggttttagtatttggcgatgttttgggggtgtgagtagtttagtttattttgggtacgtgtttatttgttgttttttttgttttatgtttgtgtttgttttttttgaagtttagattgttattttttagttttaaatattaaaattggttaggtacggtggtttatgtttgtaattttagtattttgggagattaaggcgggtggattatttgaagttaggagtttaagattagtttggttaatatggtaaaattttatttttataaaaaatataaaaattagttagatatggtggcgtgtatttgtagttttagttatttaaggagaatttagttatttagttattgaggtacgagaattatttaaatttgggaggtggaggttgtagtgagtcgagatcgtattatttttttttaggttaggtaataagtgtgagattttgttttaaaaataataaataaataaaataaaataaaaattaaaattaaatgttaaaattaatttataaaataaattttggttaaagtagtttgtttattttgttttaattatgtatattgtattagattttgttaggggtttagcgtataaagatgagatttttgttttgttagataggtgggatgatggttatattttgagttagttaaggtattatttggttgtgtaataaaagttaaaatattagaggttgagtagtattcggatttacgttttagtttaagtgttagtcgttatgggggtttaggatagttcggatttagtttatttttttggtgtattttcgatatatagtttttattttttgagttgagatggttttagtttttgtcgttatgtttgtattttagttagagggaagggaagaagggagaggggaaagggtaagtgtttttttttatttttaagggtatgatttgaaagttaaatattttagtttttttttattggttagaatttagttgtatggtcgtttttgttattagggaggttgagtaatgtattttttagttgggtttttttgtgtataattaaaattttagttattatagaaaaaagggagtttagatattggggaaataattagtatttgtattatatgtattgatagttttttttgtatgaatagagttgtggtaggttttatgttagggagaaagtaagattggaaaagagtttattaaggaggtggtatttgtattgtgtttaaggggtaagaaaaacgttttttaattaggagttataaatgtttggttgaagtgttattgtttttttattttggagttggaatagacgttattagttaattatgatggttgttgggtgtattggttaatatttataattttagtattttgtgaggttgagggtgggaagattgtttggggttaggagtttgagattagtttgggtaaattgtaagattttgtttttgtaaaaaaatataaaatgtagttgagtgtggtggtatttgtagatttagttttagttattcgagaggttgagatgggaggatcgtttgggtttaggagttcgaggttgtagtgagttatgattgtattattgtattttagtttgggtgatagagtaggatttgtttttaaaaataataaaataaaattaaagttttaaaatggaaaaaaaattatgagtatataattttagatgtatttttaagatagtaaattcgggtgggcgtagtggtttatgtttgtaattttggtattttgggaggttaaggtgggtggattatttgaggttaggagtttgagattagtttggttaatagttttatttgtattataaatataaaattagttgggtatggtggtgggtatttgtgattttagttatttggaaggttgaggtaggagaattgtttgaatttaggaggcggaggttgtagtgagttaagattatattattgtattttagtttggagaaaaaaagtaaaattttgttttaaaaaaaaaaaaaaaaagtaaatttagggttaggtttgtagttatatggttatttttttttttgagtatggaggtagttttagaaatttgttttatattatattagtgggtagttgattgggttagtttgttagttgaattttatttgttatagttattttttatagtaaggggtattttagatatatttttttttttagggaagaataagtcgtagttgtttgagcgttttatttagtggtgtgtatgtttttttttaattttgtgtttagtgatgttttgtttgtagtttgaaatttgttatagtgggtgtgtttatattataggaattggtaaatattatatattaggttttattttttgttttttattagggtaggttgttttttttttgttgtttttgttttttgtttttttttttttttgagacggagtttcgttttgtcgtttaggttggcgtggagtgatgcgattttcgtttattgtaagtttcgtttttttggtttatattatttttttgtttgagtttttagaatagttgggattataggcgttcgttattatattcggttaattttttgtatttttagtagagacggggttttatcgtgttagttaggatggtttcgattttttgatttcgtaatttgtttttttcggttttttaaaatgttggtattatgttattgcgttcggtttagggtaggttgttagaaatgtattagtttgttagttttagttttgtttgttttttattttttttttttttttttttttttttgagacggggtttttttttgttgttttttaggttggagtgtagtggtgtgattttggtttattgtaatttttgttttttgggattaagtgatttttttgttttagttttttaagtagttgggattataggtgtttattattacgtttagttaaattttgtatttttagtagagatggggttttattatattggttaggttggtatcgaattttttatttaaggtgatttattcgttttggttttttaaagtgttgggattataggcgtgagttatcgtattgggtttttttcgtttttttttaatgaaaatttttttgaaagatttgtttattgatgtttgtgttaataggtattgtttgcgggatagagtttgttttttttttgaaggtttttttttgtttgggtgattatttgtatgttattttttgttgtttagaattaaagatgtagttatgtttggggtaggttgggaaaatttgtgggaattatagagtttgttgttatgttgtgttttggatatttgaagtttggtaggtaggtgggatcgagggtgggtattaggaaagtgatgtggttttataggaaggggatataggttttgagattttaggtttttaattggataaagttgttttttttttttggataaatgttttagtttatttataatcgagtggttagtttttttttttttttttttttttttttttttgagatggagtttcgttttttcgtttaggttggagtgtagtggcgttatttcggtttattgtaagtttcgttttttaggtttacgttattttttcgttttagttttcggagtagttgggattataggcgtttgttatcgcgttcggttaattttttgtatttttagtagagatagggttttatcgtgttagttaggatggtttcgattttttgatttcgtgattcgttcgtttcggttttttaaagtgttgggattataggcgtgagttatcgcgttcggttaagtggttagtttttttagttgtcgggttttgtatattttgttggttttggagattatatgtattatgtagattttatttgttttttatttttagtgttgggggaggggttaagggtttgtcgatgtgttgatatttggttatttattggttttgaatgtttatatttatttttttgaaatcgatgtttcgtatcggaggttttatgtggatttgggggtagaggtttgtattttagatggtggggtggtttttattaattaggtagattttttgttttgttttgttttttgggttttgtagttttagatgtgtgtttaagatttgtggttatatggatgggataagttatagagatttagatttcgtggtttttgtgattagagtagtcgtggttttgtttgggaatgtttttattttgttgttgaaggtgagaaatttttttgtgttggagaatagttgtgttgagaagttggtttatttggtttgtaggattgttggggtaagggaggtttgttgtcggttttttttttttttttttgattgggtgttttttgtttaggttttttgtagtaaaagaattttttaatttattttgtttttttattgagtttttattttatgaagtttattttttaattttagttgattggtttttatttttttaagaggaaggttaggggtagacgaggttgaaggaggttgatttttttgtgttttcgtagtttgagttgatgttgttgtatgtttatagggtttttttagtttttaaaaaggttttaatacgttcgttatacgtttgtggtttttttggatgttatattaatttagtaaggtttgagttagaggttgtttttgaggttgtgaaaatagaagaagggtttagaggagaatttttttatttgacgattttaggaaggttttttagaagaagtagtttttgagttgagatttgaagatagattaggtttgagttaggttagggagggtgtgaggggtttattaggtagagggaataggatagggtaggtatagaggtttggtatttggtttgtggggaagtgtgagtttttgggtatgattaaggcggggagaagtggcgtgagaggaggtagatgtggttggtaggagatcggcggtttcggttttgttgagttttattttgtatgtattaggtgatagaggttgtttaggacggtgggtagggaagtgataggttatatggttattttattaatagtcgggagtttagtttggggggatttaagattttggggaaggtacgagttaggggtttgttagagttaggagttagtgggagaaggaaatagtgttgtttatgaattataaatagatattttcgtaattttttttgacgtgatataattttaaagtgggttatttagaggtgggaaggtgatttttggttttttaggttttgggtttgttttttttttttttttttttttttttttgagatggagttttattttgttgtttaggttggagtgtagtggtgtaattttggtttattattatttttgttttttgcgtttaagtaatttttttgttttagttttttgagtagttgggattataggtatttgttattatattcggttaatttttgtatttttagtagagatggtgttttattatgttggttaggttggtttcgaatttttgattttaggtgattcgtttattttggttttttaaagtgttgggattataggtatgagttattgtgtttagtcgagtttatttttaagttttttttggtttttagtgtttttgtattagtttatttttttggttttttgtttttaagagttttttttaagattgtttttaagtggataggtttttagaattaaggagtagttttaggagtttttagttatagatattttagggggttcgtgtggtttttagtttttggtttggtttcggtagttttggttttttgtgttgttttttatatagtttggttagagttggttaggttttttggttgggtcgagttatcgtggttagtgatttatgtagggggagaaaagtgaggagggggaatagagtgcgagggggattgtgttaataataaatttattaggtttttgaggttattttataggagggataaatggtttatttaggttgatttggttgtcggttggtttttagagatatttagggtggggaagattttattatttggggaaagtaatattagattgtttggaggggtttagttagcgtatttcgcgttttttgtttgttttttacgtagagcgttttgtttttaaggcggtaggttaagagcgcgagtcgaggtttaggtgtaaagaggggtgcggtatgggggtattgtagggtacggggtgtatgtatttttatttatttttttattgagtgttagggtaatttgttaatggggtatatttggtgatataaaattttttgtcgatttatggtagtttggaacggagtggaagcgttttatttttggggaatttttatatatatttggttgtgaacgtcggtgtttttgtattggagtttttttggagtgtgttgggtagagcggagaggtttttttttttttttttttattattttgtggaggtgttaatatgtagttagagatggttagtggtagtgaggagaggggggtaggaagagattagggttgggggtttgttagtttatagttttatttttgaatatttatggtttttttgtttaggttagcgaggttgggggtagagacgggtaggggttttttaatgttgggtattttttcgtttttttatattttggatttgttttttggagaaagttttggagtatttagaagttttggggttgttggttgaggtggggagtagagtttagttgtgtttggaggttttttatttttatttagtttttagggatagttttagttgtgtaggtttaggtcgttgaggttggttttagaaatttttttataattattattggatggaaaattagttttttaaagggttttagagttagttttgtttttttttttataggtttttatagttagagtatcgggtttttgttagagatgtagaagagacgatgtttttagtttttatgtggttcggtttttattgtggatgttggtgattttagttttttttttaaaattaagagggttgatgttttatattttaggtttttagaaagagtcgttatttatttatatcgttatattttttttttatttttttgtttcggaaagagtagagtggatatgcgtttttgtagaaatttatttatagtttgattgtagatgtattttgtttttttattgagtttttgttttatgaagtttgttttgtttgtatttttttttttttttttttttttttttttttttttttttttttttttcgtttttttttttttttttttttttttgttttattttttttttttttttttttttttttttttttttttttttttttttttgttttttttattttttttttttttttttttttttttttttgaatagttaaagatagaatgaatggtataggtaggtattgagttttttgtaattggaggtgtttaagtgtagggtggatgggtatttatagggtaggtattgaggaaggatttttttgggattgtggatggtaggataggttttgtggagttttttgagcgggtgtagaagagggagggtatgtttttgttttttgtttttttcgggttgttaggtcgttatttttaatttttattttttttttttttatttgttgggttttacgggatgggtagaggtattgttagaatatggagtcgcggtttatagagggttagtagggaggagagttttttggggattacgtcgttttagttattgtggtgattttgaaaataaatgtttttttttttgtttgagtttttgttgtttttgttgacgtggaattagggtaggttggtgatttagtttttatttttgtattgtatcggtggtaagttgtttttagttttagattttatagagtagggtgttttttttagaaaaatagtagggaggttaggatattaagggttttagggatagtttgttttttttggttggtatgagttttagttaagttttttggtattttgggggtgaggaggtattagttgtgtgttttagttattggttgttttgaggttgggtcggtgttaggttggttatttttttttgttttttagtgtgattttgtagagttttcggaagggttagagggtttttttttattattggtgtttatgggatattgtgtttttattttatttttgtattttagttttagacgggtgttaggaagttggagattttagttattttacgattgtgttttgcggggttggagtaggaataggagtaggaggaacgttttggttatgggattgtgtgaagagagaaggattaggaagaaaatatgagttattatgtttgggttatattttagtagagtcgttggtggttttttaggtatttgaatttattaattataaagtttattaggtgtgtaaataaataaatgttgtttaggaggtatagttagggttttgttggagagggattattttggaggggttatattttttatttagttttttagtttttttgttttgtgtgtgtgtagtttttgattattattatttttgtttttgttatttgtttttagggttttattaggttggatgttattgtaataaaatgtagtaatagaaggtttaggtagtgttgtagtttttggtggtattattagagttagtaggtagtagggttggggaattttaagttgatttagttttaagtgtcggagcggggagttcggatgaggtgggggtggggaatcggggagttatggagtagagtatttgttgtgttgaaggttaggagtttttttgggagattatgaatttagaatattaatattttgtttaaaaagttttttgttttggagataagagtttaggtcgttgtggttaggttttgttgtaaatgttttgtataaagtaggttggggggattattgggaagtttggggaatagattggttatgtgtttttttgagtgaaattttatggttgtattgaagcggttaggtagagggtgtgatggggtgtggtagttgtatatcggtttagttaggttgaatggggaaatgtaaatttaggtggtttgaaagagatttagtggtttatagtttggtggttgtttttagtataggtgatgtaaagagagaaggggtttcgggggtttggtttaggtggaaattatgtattgtttgtgattttgggtatgtcgaggttggagtaggtttgtttggtggttggtagaacgtatatgaagaatttatgtgtgttttgaacgttttttttgtttttttgggtttatgttttattaggagtttttcgattttgttattttgtaaaggaaattgcgttttgttattgtataggatcgaataggtgtgtgtggagtttttaaagttattgttttaaggggttttatgggataatgggagagttgttgtgatgtttaagattaaagtgatggttgggcgtagtggtttacgtttgtaattttagtattttgggaggttgaggaggatggattatttgaggttaggagttcgagattattttggttaatacggtgaaattttatttttattaaaaaaataaaaattagtcgggtatggtagcgggtgtttgtaattttagttattcgggaggttgaggtaggagaattgtttcgatttgggaggcggaggttgtagtgagtcgagattacgttattatattatagttcgggcgatagagtgagattgtttaaaataataataatgttaataataaataaaataataataataaaataataaaagtaaggatttgaataaatatttgtatatttatgtttgtagtagttttatttttaattgtttaaatgtggaaggaatggatatataaagtgtgtgtatatatagtggaatattatttagtttttaaaaggaacggaattttgttattatatgtgaattttgaataatgaattttgaagattttatgttacgtaagtttgttttataaggataaatattgtatgattttatttatgtgaagttaaatttatagagaaattggaatgacggttgttagtagttaggggaaggaaggatggggagttattgtttaatgaggatagagttttagtttgggaagttggaagaagtttcggaggtggatggtgttgatgggtgtataatgtgaatgtatttaatgttattaatatggaaatttggttaaaatggtaaatttgttttttttgtttttgttttttttttttttgagacggagtttcgttttgtcgtttaggttggagtgtattggcgtgattttggtttattgtaattttcgttttttaggtttaggcgattttcgtgttttagttttttagagagttgggattataggcgtttgttattacgttcggttgatttttgtatttttagtagagatagggttttattatgttggttaggttggttttgaatttttgattttaggtgatttatttattttggttttttaaagtgttgggattataggcgtgagttatggtggttggttaaaaatggtaaattttatattatatatattttattatagtaaaaatgtattgttttattagaaaaatgatagatttttataatatgaattaaattataagttatgaaggaaaaattaagtaaaatattaaaaaattatttataagtaattatatttaaaataaaagataataaatatataatttttattattttttaggttttttgtaatatttaattattgtttgttttgttgcggttatgtttttgaggttgtatttgtatgatagaaatattatattcgtggtgattaaatatttttttttagttttatttttaatgatgttatatagataatttgaaattggtcggttgggtacgatggtttatgtttgtaattttagtattttgggaggttaaggtaggtagattatttgagtttaaaattagtttggttagtagggtgaatttttatttttagtaaaaatataaaaattagttaggagtggtggcgggtgtttgtaattcgagttatttgggaggttgaggtaggagaattatttgaatttgggaggtggagtttgtagtgagttaggattgttttattgtattttagatcgggtgatagagtgagattttgttaaaaaagaaaagaaaagaaagaaattggttaaggtaggaatattgatattataggaataggtaagcgttataaatcgggaaattgagtgttgttgtttttgttggttttaggtggtcggttgttgatcgttaattggtatattattggaggagggaggtttagattgattcgtagagagattagaggtagaaacgtattatggtttggatgttgagggtgagggaaagagaggagttaatagtggtgttcggagatttggtttgagtaattaggtggatggtagtatcgttttttaagatgaggggttgtgggaatttgaggggttgtggaaggttttgttattgacggatttagggttcggtagttttgggaggtttattttgtgttaggttacgtagagataagattatttgggttttgtttttgggaagtttttgtttatgaggatatagtttgttatttaatggggtgtttcgtttggagttttagtgttgttgggagaaagttttttattttttttcgtttttcgagttttttttgtttttttgttagttgagtttttttatggaggttgtgtttggaggggggttatggatatggatgtgtgcgttaaacgttgttttttcgtggattttttttttatttcgtttttacgttttgtaagttttattttttcggggtttgatttgtggggtttttttttagatttgtttttttttatttttagaaaggcgtgtaggggttttttatggtttttttttttgtttttatttttttttttttgggatagtgatttgttggacgggtgggttatttatagggtttgtgattgtttagatatttttgttgtatgaagttttgattttaaggtatgatgtagatgggaataaggtacgagttttttttggttgttgtaataattgtcgaaattgggtggtttatagtaaggggaatgtgtttttttatagttttggaggttagaagtttgaaattaaggtgttagtagggttagttttttttgaagattttaggggaaaatttttttttgttttttttagtttttggtggttttaggtgttttttggtttgtggttgtattatttcggtttttgtttttgtttttataaggtttttttttgtgtttttgtatttttttttttgttttttagaaggatatagtattgaatttagggtttattttattttgagatttttgtttaaattttttttgtagagatttttaaatagaattaggttatatttgaggttttaagtgggtatatttttgttttgggggggattatcggtttattgtaggtttcgttgtgtattgaagacgtaggcggtttttttggttaggtttgtagtcggttttgtttttttttgtgatcgtggaagaatgtattttgttggatgtataggtttttatagtttttttgtttttgttaaattttagtttagttttttttttgttgtcggcgtgtattttttttgtttagtgttttttttgggattgtgtgtttaggttttgaggttttagaaaaggggggtggagggtttttttattattttgtagtaatgaggttttattaaaattttggagttttagattggatttagtttttagttatgattaaaggatagttcgggatatgattaaagggttagagaaagatgatttaggttgagaaagaggaggttaaggagtaattggattgtttttgaatgtggaaaaggtaattatgatttgaagggtggtgtttagttgttttttattttttttgaggataggaaaaaaaaggaaataaatgatgtataattagagtagttggttagatacgagggtgaattttttggttgggagtatggttaagttttgatttgggttttttgaaagagttcggggaatttttttatttggaggtttttaggtttggttatgtggttttgagtgattatattgaaggggtagtggttggggttggagtcggtgggttttgagtatagttacgaaggtatgcgtattttttggttgtttttttgttattgttttttgggtttttattttggtgaggcgtgtattttggcggcgttttttagggaattaaatatgtttgttgtattgtgcgtggagatggagaatgtataattggttgattttgtgttaatttggtggaattttatgttagttttgggaaagaataattgtatgggtgtgtttatatttattaggtgttttttagaaaaatattcgagaataatgttgtggtttaggatggttgttgtgtcggattcggtatttttttaggggggttgtgttgttgggttgagttttttaggtattggatttttaaatttttaaatacggcgtggataggtggtttagtaggggttggattattcgataggtttaggtgttggagtttagataagatatattttggtttggcgtggaagatacggggtgttattaatggtagtaatggttgtatttttgaaattcgggtttttaggtcgacgagggtgtgtacgtatttgaaatgtttgtggttttgtagtttttatgtttataaatttatttggttgaaaatagtttaaaatatttaaagtatgagggagggagtgtttgttttttttaaaaaggaaggatttgattttatttatttaaaaagttatttaaatttagaatatttttcgtaagagattttttgtttttcgtttttttagaatggttggagagttttagtatttttgtatatttgggatattttagagggggtggggaggggtaagtgggtagcgagcgattttagatttaggatgagttgttaggcgtttttcggttatatatttaagggatcggagtgtagttgtagcgttgcggtttgttgtttcgggggtgggggtgttgttttatgttgtgaatttttatatggtttttgattttgggtagaggtcgagggtttaagggacggggtgatagggagagtatgtaggagtgggtttttggttttttagggcgagtggaagaagcgttttttttttttgtaggtgatagatttggggggttttttttgaggatgagagtttgttgttttttaagttttgtgtttaatttaggtttttaggtttattttagtttttcggttttgtttgttttgtggatgatatagtttaagggtagagatcgttggtttggagggaaggttaggttttaggttagggtttagaagggagggagaagtttttggggtagttttttttttgtttatttattgtttagtttttttttttatattttttttcggaaacgtttgtttttgataaggtttattttttgtttttaggaggtttttattgtggaggaagggaggcgtcgttcgtttttggtttttttgatagtcgtgttttattttcgttttgtgttttttttttcggatagtgttttttttagggtttatttaggagggtgtagcggtggttttcggggcggtggtcgtggtgggggtgttagttgtaggggtgttttcggtgggtgggagttggtggtttttcgttggtgttatgggattcgtatgttcgttttgcgtttttcggtttttgagtttataggtcgggattttgtttgttagtcgcgtgcgttgtcgtttaatttttgtaggcgtagagcgcgcggcggcggtgatagagaattttgtttggttgtttaaatatagttttttgtagaaggattttgcgttcggggaaggggaggaatttttttttttttgggcgttcgtttttttcgttatggttcggtttttatattcgtttatatttggtcgtagcggggcgttcggggggaggggttgaggtcgcgtttttcgtcgttttttgggcgcgggttaggcggggaggaggggggcgtttcggtcgtgtgtttaggattgttttttagcggttattcgggttttagttttttaggtttggttttgataggcgggcggagtagttagtgcgagatagggaggtcggtgcgggtgcgggaatttgattcgttcgggaggcgggggcggggcgggggcgtagcgcgcggggaggggtcggcgttcgttttttttttttatttatttagttgagttagggggtttaggggttttttcggcggttagttttgtattgtaggagcgcgggcgcggcgttttagttagcgcgtagggttcgggtttcgtcgggggcgttttttcgtcgttgtttttcgcgcgattcgttgtttattagttattatgtcggatttcgcggttaacgcgtagttggatgggattatttcggatttcgaaggtgggtgttgggttggttgttgcggtcgcggacgtgttggagaggattttgcgggtgggtttggcgcgggacgggggtgcgttgaggggagacgggagtgcgttgaggggagacgggatttttaatttaggcgttttttcgttgagagcgtcgcgcgttttcggtttcgtgttcgcgtcgtttacgtgggggattttgttaggggtattcgcgtagattttgcgcgtttttataggattttgtgttcgttttgcgtattgtcgtttgggtttttttttttttattgttgtttgtgtttgttaagcgatagcgattttttcgagggttcgcgaggttgtttcggaattttttaggacgtatagttttattttgggaaatttatcggttttttttttttggtttttttcggcggttttcgggtttcgtttggattcggtaacgggatagggaggtcgttttttattttcgattgagtggatagtcgcgttttgttcgggtggatagttttttttttttttacgttagtttcggggtcgttaagttgtgtagttcgtgggtcgggagtatcgaacggatatagtttaggtcgtggtagggtttagagtgggatgttttatggtttttatttaggtttggggatatttttattcgttttttagaatcgggtcgtgggggatagaaggggtttgcgtgcgggtagggagagtattttggtttttttttgttttcggggtttataaagtgtgttgggatttgcggggttgttttgtttaagtttgggtttggcgttcgcgtttttgagtttgtgagtgcgtgcgtttttttgcgtttttttgattgtcggtgttggggttttgcgttttgcgttcgcgggagtaaatatagtaggcgaaggggaagtttatataatggtttttagcgttttggggtagggtttttgaggggcgggtttgtttttgtcgggatttggagttttcgtttttcggagaggtttttaggttgatttgggtagagttttttggtgggtcgggagggggaaaggttgtgttgaaatgagtaaattgtttaggtgttaggttaagttgggaggtgattagtttgaggtttttttcgttttatggttagaattagggttgatatttgggtgttttgagtttagttgtttatacggtttatttggggttagttttatttgagtgggggaggcggggttttttgggggattagaattttggttggacgttaagtagagtgttagtggttgttttttagggttgggtttgaggagggtgtggggcggcgaagggacgggagggggttgtgatttagtggttattggcgttgtgtagagtgtgagttggaaatatcgtagttattttgttagtttagtggtgaaagtttttttttaggttttatttttttgtatttttgttttttagagggaggggaggtttgggtttgtagagttgggagggtttgttgttttcgttttttttttttataatatttttttatttggatatttttgggtatatgtttatattggggtttttttaggtttattgtgtttcgttgagttttttgtagttttcgagtgaatgtgatttttttgtttttgtttttttgtaatttttttttgcgatcgtttttttaggggttttttttgttttaaatgtttaagtggtacgatttagtcggtttgattattttttagtaagtttttatggagagaggttttgtgttgtgtagagttttttttttgtttgcgggatcgaggtttttgtttttagtttttaatagaaagtgtcgggtttttagtgggatttttggggaagaattttcgtgttttaacgggagttttgtggcgggaggggaggttagggtttggggttgtgttcgttgtatagttgttattatttgtattatgaaagttgttagtgttttttttttgggtttttgggtgtaattttatttttgtttttatgtgtttttatttggagttgtttttgcggttgttttttaagttagttttgtgattttgtaatttagtttaagataatgggtttattgagattattttggtgtagtagttggtaattttttggttttgggggaaggttttttagtttcggggagtggggttttaatttgttggttttttgtgtttattagttttttttttgtgtgttttgaatggttttgttgggaattttggttttagagttattaggtggttcgagtcgataggcgtgagagagtgtgtgtgtgtatgagtgcgtatgtgtatgggggttgatttggggtatggaaaggtggttttttttggtgtttaaggagtttggagtatagttggagggtgtgggggtgtgtatatgggagttggataattttgggtggatagatagacgtggggaagggatgattgaaggaggtggaggagagagtgtgatttagtttagttaggggtgatgtggataggtagttttcgaattagggtagagaaaagttattattagttagtaggggagaagttagtatggaggaggcggattttgagggagagtaggaattggattgtaagaggaaggagagttttttggttagtagtagttagtagtagtgggggaggttggaatgagttggttggagagggggttggggtataaggaggggtttgtttgtgaagattatatgggttaggttgcggagggttaggtatgttcgtcgggagtgtagttggtttacgggaagtatttggagtggttgggaatgggcgtaggagtagcgtcgtgggagtataggtttttttttcggggcggtttatttggtgttttggtttttgtaaggtaggtcgaaagggtggggaggaaattgttagttttttatagcgttgggatggtggttttagggtttttgaggttagcggatgtgggtgtttgttattatgtgggttgttgaggggcggagattttaggggttattttaaagtaggacgagttttgagttacggtatttttgggggtagttttttaatcgagtagacgtttaggtttggaattttgtaatagaggttatagggttttgattagggtgttttgggaggtttagaattagtggtagtatatagggtagacggtaagtgatttggtatggggaaagaggtaggtgtttaggtcggtatagtatattcgtaaggaataggtagacgggaagtcgttcgtgggtttgtgtgtgtgttcggagttaaaattttgttaatgttttatgttttgggtatatttattttttttttggggagtatttttttttttatttttttttttttcgtttgttttttttatttagggttttttttatttttttcgttttggggatcgagggtattatggttttatgttttattatcgatgagttgtatagggatttagttttttcgttgtttaggtcgggttttttaggtttagggtttttaggaatggagagggtattagtgttttttatggatttaaatttttcgtatttcgtttttgttttttttttaagataggttttcgagttttaaggttttagggttttgtggaggtcgttacgtagtagtaaggagaatgttttgtatttggttgatgagatttttagagttttattttttatttttttattgtataaacgggtttttaggcgattgtagtattcgttattgttcgtaatagggtgataagagggatgattttttttttttttttttttttggttggtggaggtacggggttggcggacggtatgtgttttcgtgaatttaggttaaatttgttatcgtaaatacgattataattcgggtttttgtgtaataaaagtttttttaagtattagttgttggtttgttttgtttagcggtgtttgttgtaattagatttgtatatcgagaaagaatttaaaagtttttgatgtttgttgaaataatttggtttaggatttacgtgtttagattttagagttgtgtggtatttgagtttttttcgagtttttattgtcgttcgaggaggatttttagatttgtgttttggaggtagagtaggttgtgggacgggtttttgggtgggaaggattatgtggatatgtttttttgtttgagagttttaatattttcgggacgtgggagttggcgcgttggtaggatttaggtgttttttttttttttagagaaaaaggtttcgttgtttggtaataggtgtagatttgtttttaattaatgttagtaggttttttgcgtgatgaattttgttttttagttaagatttaaggtattttgtgaatattgtttttttgtagtttgagtttttgtggtgggaggtaggagttatggggagtgggggtaggttttttatacgggttttatagttattggtagtattgatttgatgttttttgagtttagagtttagggttagatagatttattgtttcgattacgagttggtttatttagaggggggcggatatagtatttaggtagtagatgtattgtgattagttttgtagcggggttgtgggttttttgggttggatgttcgggaagaggtaggtggaggtaaacgttaggatatttttgtagtgattgggtgattgtaggttggaaatgttttttgtgggttgtggttgtttaggaaggttttgaatggggttagtggatagagtttgtatttagaggggtagtgttttggaggagtgaggggtatggtagtgtagggatgtttaggtcgtttttattttgttattggaaagttgggcggtttcggtttttttagttttttcgtttgtttttttgtttgtaaagtggggttagaaatagttttttttgagggttgttgggggattttgagatgtagtttatggcgttgagtacgggttttgttttttacgggtgtggtgggtgtcgcggttggtgtggtatttgggcgggaaaagggggtatttgtaaaggataggtaggtttggatgtttaaatatgtagatttggggatgggaggttttaggtaagggtttgtgtgatgttattgtatgaatgaggtcggatagtatggttattattaattatggaaagtacggtagatattagtgttagtagcgttcgtttgggggtttttttgagttcgataggtatttaggtttttagtgtagttatgggatttttttttttttgtttggttgatattttggaggttggcgttatgttggttgtaggttttttttattgggaggttgttttggttttttttgttattatttatttttatttttattttggagtgttatagatgggtggattatatgtttatttgtagggttaagcgttgataatgaggtgagtatttgttggatgatcggattatgaggatagcgggggcgttggtagtttgcgttcggttttgtaggttggtttttttttgaaaagcggttgtggtagagtgtgtattttagggagtggtgtttgttgttttgaatatttttatttagtaggtttttgtaagggtttagttaagtgtggtgtagagttgggttggtagttggaatagttttattttgtttagtggtgagattaagggttgatgggttaaggttgcgtgttgtttgtttagttcgtggatttatttattgagtatttttatatttttatattgggttcggggtgttaggaggtggaggggggattgggtgtttggaaaaataagtttatcgagagtttgagtttttaggggttagtattaggtagttattacggtgttcggtatatagtggttatttggtttcgtcggttgttttggtggtggagagcgtgtatggtggtcgtacgtgatgggtattatttagggtaatatagatatgtagattgtgtatttgtttgtaggagttagggattttttagtttggtaatttgtgatttttgtttattcgttgggagagaggtgttgttttttgatagtttggtgtcgggagagtagaattagggttttttttttttttttttattttttattttttatatgtttaggtattaggggaggttatatttagggatgagttttggttattgggtttagggttttattgttgttattttttttttttgttagttagttaaatgttcgtttattatcgtgtcggggatggggttggtttgtttttttgaagtttttttggtgtatagtttaggttggagtttcggacgatttcgttattttttttttcgattttttttttttattttgatttattttagaaatttagttaaaaattaagtttttgtgtttttttttgataaagttattgaggaaaaatggttaaatattgtttttttttttaaagtttttttggttttttttaaatttggaggttttgagttgtttatgagattaaagggttcggaattttttggaatatagttttagaagtgggaggatttgttatttttttagttaaatagatttattagttggtttttagatatttttaggcgtttggggtatttttgggtttaggttgtttaatttggtttgtagagtttcgaggtttcgtttagattgggttagtagatagttttagagattttaagtttgttgtcgtttttaaaagttttgttaatgtttagaaatttagagggataagaagatgatttcgatgttagtcgggattataaatagtgaggttcgtttttttttttatttatgtttgtttttattgttttcgtagttgggtttttaggggattgttcgtggttatgggggaggtcgggaatgcggggtttagattttattgggtttttcgtatttttttgtttttttttgtttattttttttttcggaaatttttgaatatttttttatagtttttggtattttgttatttttggtatttttgggttaattgggaaagttattatttgtttaatatttagaaaattaaggggtttggttttaaatatattgtagtgtttttttttttatatggtatcgaattttttgtgtttttaaagttaggagtttgtgttttggatgtgggcgatggagttttgtagatatttggagcggtttttttgggagagtttttttcgtttttttatttattcgtttttttttttttgttttaagttttggttatagtttcggaggggttatttgagtgtaggttgtttttaggtgtatagttggaggggggtagttattttatatttttttgtttgttaggggtatttttagggatttaggttttgagggatagcggaagggtggggtggggagtaggtcgttgtttcgtgttatttgggtgttatgtagattttgaatgggtagtttttgggagttggttttttttttttattttttttatagtgttgtttttttgaggggttggagttttttggagttttttgtagtttgtggtaggtttttttgattttgtgtttggtttcgtagtttttaatttatagttagtggtatgaagaatatttttggttgtttttatttgtggtttttgtaggtagtagttttttggggtagggtttgggggttttggtatttttttgtgggattttttgggtatgagggagggagttatttgggttatagatagattttttttttgtatttaggaggtttaggatggatttgttttatttttttttttggtgggaagagagtatttttggttatggggaatgtggtttggatagagttatttagtttttttttttttttaggtagggttttgaaagatggagatggttttgtttttgttaggttaatagttagtagtttggtggatttttatgtagtttaggtaggatttttttttgtttttattttttattttatgtgtaggaagttggttttaagtagggatttttggtttcgttttttacgtgggtgggtagtttttttgcgaggggtaggttaggtttttgttttatgttttttagagatcgatgttatttatagtaagagtatataagtttttttggttttaaattaggtttggaggggtggtttttttttttgttttttgttttttgttttttattaaaggttagggaatggagtgttttgtatgtttgttggggttgggtttttttttttggtttaaaatgaagggttggaatttttggtgtagattgtacggtgagaggtgttttttgggatttattcgaggagtattattgttgaatgttttgttaggttaggagtatcgttgggggtgggagaggtagttggtttatttgtttatttaatagttatttatgggtattttaagggttagttttgttttaggtattgggggtttaggtatgggtttaggagaaggggtagaacgggagggttttttggaggaaggttttttaattagagatcggggtaggagtttgttaggtaggtgatgttggttagttttttttgttattttttttttttttttttttttttttttttttttttttttttgagatagagtttcgtttttgttgtttaggttgtagtgtagtggcgtgatttcggtttattgtatttttcgttttttgggtttaagcgatttttttgttttagttttttgagtagttgagattttaggtacgtattattacgtttagttaattttttgtatttttagtagagataaggttttattttgttggttaggttggttttaaattttttattttaggtgattcgtttattttggttttttaaagtgttgggattataggtgtgagttattgcgttcggtttttttttgttatttttgtagatttatagtgtgtgtggaagattgtatgtttgtgtttggtatagttgttttcggtatttaggtgggaggtgggggagagggttgttggtgttagtataggttatggtatgagataggttttcgtagttaagcggggtgtatcgtagtattggaggggttttgttgcgtacgagatttaggttttgtatttgtttttttttttaggaggtttggagggttgggagggattagggtggtgaaataatttaggtgggagagaggtattgttggagaggtagagggagttgtaggtttgtagtagcgagttttaaattttgggtttttattagaaaattttagaaagggttgttttgtttttttttttaaattataaaagaaatttttggtcgtttgggttttttggggtcgggtgggggaggagattttttattcgtatttttgtaggtttagtattgtgtagagggaggagggtggaggtaaaggcgagggaggagggtggaagtaaaggcggggtttttttttagtttcgttgttttgtttggttgttgtttttagatttttatttttggttcggaaatatggaattttgggatagttggggtagggggtatagaacggagattttggtgagggaggaattttttttttagttttggttgtggttatagtaaggttaggttgggaggattttatttaaatatttatattttttttaatatttaaatgatgaagtaggtttttgtatatagttgttttggagttagttgttgtttgttttatttttttttttttttttttttttttttttttttttttttttttttttttttttttttttttttttttttttttttgtattttttgtttttgatttaagtttaggtttttttagttgttttttttttatttataggtattttttgtgattgagtttttttttgttattttttataattattttttttaattgagtattttttaggtgttaggttttgggttggtattttgtatataaggtgttttttaatttttacgagagtttaataaggtagattgggttgttgaggttttagcgttggaaggtcggttcgggtttttttagttcgtatttgtatttatttattatttttttattgtggagatttgttttttggtttttggttgagtacgatggaaatttttgtttattagtttttggagagtggggatggttgagggtttcgattttggggtttgacgggggttgtttttgttttattttagtttggttgtttttttatttaatgattgagtttgtaaaattagaataatagtgttatttggttggtattttgggtggttgggaggcgtgggagagggtgtacggaggggttgagcgaggtgttagtatcgtggggattttcgagggtagtttttttaggtttagggcggagtgtaggtagagggcgcgatggtttagcgtgtcggtttatatttggttttgtttttgtttatacggtaatgtgggggagttattagttttttagtgttttagttttttatttgtgtaatggggataagagtaaattattgtttttaggtatggtaagtatttatatatattgattattgtagaatgaatatagtgagttttttttaggtttttattatatgttaggtagggtgttaggttttagtggagaggggataatgatgggtaagttggtttttgtttttaagggttgtcgagtagggaggaaggcggcggttgttttgattgtgattcggagtggggtgattcgtaaagaggttggcgggaggttggttgggggttggttgggggttgtttttttttttgtttgtgtttcgtggtagggtattaaattggttttttttatggattttcgaggttttgattgtgggatttcgggtaggttttgggattttgtgattttgttttcgtttgttatttaggtttttgtttttagtagtgtttagtatacggcgatttttgtatgttttttagtgtgtgattgattttggagttgagatttggtagttgaggttggatattgtttttggataattttcggggaggtgggggtagggtggggttgtgagttggtaatttcgagtttttagtagttttcgaatggaggttttttttttgtaggattttcggggaggaaggaggggatgggggagatgaggtttgtgagtttttaggagggtagaggtttatatttgtagcgttttagaaatatttcggggtgtttaggtttatttagtttttttgagttagaattattaagagttggggattagtagtttattttttagtaagatttagaaatgatttttttgaatagttcgagttaagaatgatatatttggaattagaatattagaattatagaggaatcgagagaacgggtttaaaatgtgtagggattttagttatatggcgttatatggaggaaagtatttaatattattattgtatgaatttgtttaaatatatatatatatatatatatatatatatatatatatatatatattttttagtaaagagtggaaagatatttgttagaatattgatggaagttatttgggttgtgggtttatagattttttttttttgtttttgtgtattttgtaaattttcggttttgtgtttaaattttttttatagttaggaataaagtaatagatgttattttttaaagtttatgggttcgtgttcgtaattttaatattttgggaggttgaggtaggaggattttttaagtttaggagtttgagattagtttgggtaatatagggagatttttatttttttttttttttttttttgatagagttttattgtgttttaggttgaagtggcggtggtacgtttttggtttattgtaatttttgttttttaggtttaggtgatttttatgttttagttttttgagtagttggattatagatatttatatttgtaggatttgagaattttataagaggaaagtttttattcggaggttgttggggatttggagttgttagtttatatattttttagtagagatagggttttattatgttgattaggttggttttaaatttttgtttttaagtgatttatttatttcggttttttaaggttttaggattataggcgtgagttattgcgttcggttatgggagatttttttttaaaataagaataaaaataaaaataaataaaagtttattgttaaaaagaaaaatatattatttaatttaatttttttttaggattgagagatgaggaagtagaggtcggaaagtgttatattttttggtcgttggtagttaggggatttgaggtttgggttggttttttcgtgttttaggtttggggtgttaggtggagtttttgttttgtttaaaggtttaggtgtttttgttagtattgtttgtttttgtatttttggttataaggaatgtgggttaaaggtagggtttttgatttttgtttaggagggtgaagtgggttggttttttttgtttttgttttaaggtttttgcggttgtgtttttggaaattgttggttcgagttagtgtgcggagttgggatagattttatcgtggttttcgtggggttattttatgttcgggttggaagggatttttcggtttagttttttttgttttttattaggaaattgagattagagaggttatttgtttggttcggggtggggtgtagatggcgtttgtgatttttgtatgttacgtgtagatagttttttagttgtgggttttttacgtaagtagttatgttggggataatttggttgaaatttgcgatttaatgaagagaagaatgattttttttgtagttttgtgttttataggtttttttttgtttttattttttttgtagaggggttttatgttggtgggtgggtttttgttgttgtaatgggtttaggtagtttttgggtagtggaggtttggttgtttttttgtttaatgttttttgtagtttacgttgttcgggaagggcggggaagtatttagttattggggattttataagatgggtatttgggagatgttgattggtaggttaggttttcgtggtttataggtaggttagaggttatagtgttgagttgggttgagttggtagtttagggtagtgggggtgggggtattttgtttagttatgggtttttttggtataagggtttggagtttattgtaaataatttttttagttttttttttttttataggttattagtagaattgaggggttttttgttgatgaggtgtggtttgggaggggttagttgtttgtttatttgatttttgcggataggtgattataggttttttgttttagggggttgggggaaagatcggggaggtttttttggtttttttatttggaaggaaaatacgggtataggggagatattttatagggatatattttagttagtattttttggttgtgttgggggtatagtgtttgttttgtttataagaggggttagttttttttaggatttaattttagtttttagtgtagggtagatgagtatttagaggtttagaggatttatattacgagagagaagttgtgattatataggtattgaaggttaagtagaagagtgggatatacgggtgatttgaaagttttagggttagtgtggttagttttagatagttggggagttttgggtattaggtttagtaggggaggagggttttcgtgatagtttgttggggttgttgtaataaagttttacgaattttgggggttgaagatggttttagaggttagaagtttaaaattaaggtgtcgattaggttgattttttggggtttttgcgggaggtttcggtttaggttttttttttagtttttggtggttttcgggtgtttttgggtatgtagatgcgttacgttattttttgtttcgtttttatatggttttttttttgtgtttttgtgtttcgtaaggatgtttgttattgtatttagagtttattttaaatttaggatattttttttttgagattttttattgtatttgtaaagattttattttaatttttgttatatttataggttcgagggttagggttttggtatgttttttgggggttattatttagtttattgcggtagttgattttaggggaagtagaatgttttaagtttggggtgagcggagggaacgttgttgggtggggagtgggagattaggttcggagatatcgcggattttttttgtttgatgagggcgtgatgaggtttttattttaggttttttgaatggcggttgtttttgaggagatttttttttttggatttgtttttttagaaatttttatttaggtttaggttttaaggtggatggtaagaggcggttgtttttgttatatttgatgggtgagtgtgtgaacggggttgggagtaggatatttgttatttttgtggatagattttagaggtttatgaatttgttgttggggaaggtgtttgatttagtttgattttttatttttattttttttttttcgtttttttttattagttttgtttttagagttttatttttttaaaggtaggcgtcgttttttggattttttagtagttattttttattttagattttttttttgtaggtttttttggttttagcgtttatttttttttgggtttttgtttttttatcgtgaggtttttgggtagaagtgtggggttttttcgttgtgtttggttttcgcggtatattaggggtttttttaggggttcgttttgttcgttaggtttttagggagttttttaagtttttagatgggtttgatggagttttttaatgcgttgttttagagtaggaggggtttcggttgagttcgagagtttttttagttatattttgggttgtttggggtagttaggtagttcgttttttggaggtgttgtttttttttggttattttttttggaattttttgcgtttagttgcggttttttttatatagtatatttattatttttttttatttgtgatttttttttgttaatttttttatgtttttgagaatggagattaggttttttttattttggagtttagtagaatttaaattaggtagattcgtgtaggtttacgtgggggttttgtggttattgtggttttgtcgttatttttagtttagtttggcgcgttttggattatgttatttagtgtcggttttttaaattttttttttggttttgtaggtttgggaagtagttggtttttgggtgtagttgtgatcggagtttgaattttgttttttggggttatcgttttttgtaattaggttgtagtttatattggttcgggtagaggttatcggttgttcgttttggggttataatatagagagtttcgtgattaatggaggttttatttgggttaagtggtttttggtgttaggcgtttttttttttttttttttttttttgtattttttaagtgtttgtaatattttttttaatggataatgagacgaggagggagggaggggtggtttttttgtttaggtagattaggaatggttatcgtttgtgtgtgtagtgataggtttgggaatagataagggagagtttgttcgggaggttggatttttatatcgatgttgtttgtgtttggtagttttgtttcgggttttagaatagatattgattaatacgttttttagggtttttaggttcgggttttggttttcggtagagttttttatttatgggaagaagtatcgagtagttttgttggtttttcgtagggagttgggatgtatttttaagagtagtatgcgtgaagttcggggtttgggtaaaggagtgtttggggaagagtttgttgttgttggagggtcggaagtagaggggaaggaggggtacgcggtaggttgaggaggtggttggcgattttgtggtggggacgagggggttatgagtagattaggagttagtattacgtttttttgtttttagaatcgaggacggagagttgttagagaggttttggcggggtgtttggggttatttaaagggcgtgggtggattaaagttgaggaaagttttattttgggggatttcgtatttaatttttgaggtttttagagttgtagtttgtggtttttcgaagttaattattttttagggtttcgtttttgtttttagcgatagttatttattagggagtttttgatttaaggagatttgaaaggttatttggttttttttttatttttaggtaggttatatttagatttttttatatagattcgttttatttttttgttgttttttattagggacggagggtgggcggtttttttatttaggttttggcggttttattttagttaggaaattttttttttttatttgttttatatttttttttttgcggttttcgtttatttttttttaatttgtttttagtggagtagttagtagttggtttagaattcgggggtggggggagcgttagattagtgtagtatatttgagagtgtgttagaggtgtttttatttttatagttgatttagtaaagaaaagaggaagtttagtaatttagcgttattttaaagttcgtttggaatgattttgtggttgtcggaattaggggtacgcggtagatgacgggagtaggtatagagaggttttcgtttcggattagtcgttgttgtttttttggaggttgggttgttttttaagaagaggatttaaggttttgtgagcggtggttttttttggagtttttattgtggttttggttttgttttgcgtaaagagagatggtttgaagtagaagttgttacgtggttgttttaggtaggcgttcgtagttttagttattcgggaggcggaggtaggagaatggtatgaattcgggaggcggagtttgtagtgagtagagatggtattattgtatcgtagtttgggcgatagagtaagatttcgttttaaaaaaaaaaaaaaaaaaaaggagtagagaaattttttttagaaggtttgtagttattttttttttatgttttagaggtaaaaaaaaaaaaaattgtatatttcgttttttttttttttttttgagacggagtttcgttttgtcgtttaggttggagtgtagtggcgcgatttcggttcgttgtaagtttcgtttttcgggtttacgttatttttttgttttagtttttcgagtagttgggattataggcgttcgttattacgttcggttaattttttgtgtttttagtagagacggggttttattgtgttagttaggatggtttcgattttttgatttcgtgatttgttcgtttttgttttttaaagtgttgggattataggcgtgagtcgtcgcgttcggttatacgtttttgtttttgaataggtggttttttgattttgggtgtggttattttaagattttgttttggtggggtataattttggttttaggtagggcgatcgtataatttattgttttttgggggatacgttagtgaaagggatttttgaatgattacggtgggataatagatgtgagttgggtttgttttaggaaggttggatgtatgggttttttgagttagaggagataatagtagaaagttttgcggttgatgggatcgagtaggagaagggtcggcggaggttggggtaataacgtatttgtttattgtgaagggtttgtgtgagttgatggttgatgagagggtagtggggcgaggttgttttttgttaggttagattagttttaggatatttatattttttttttagaatcggtgatttagtggttagaaggggttttagaattgacgggatattgagggagtcgaatggaatggttggagtggttatagtaggttttaggttttttttcgttttttttttgtgttttgtttttggggtttatattttggggttgttgtaatagagtgttataatttgggggtttataaatatagttttcggcggtttttggagatttttggcgttttttggtttgtagacgtattattattatttttgatttttggtttttgtttttacgtggttttttttttttgtttgtgtgtttttttttttttttgttttttataaagatgtttattattggatttagggtttattaaatttagaatgattttattttgagatttttattttaattatatttgtaaagattcgttttttaaatgtgattatgttcgtaggttttaggagttaggatttaagatatatcgttttgggggatattgttgaatttattatatttaataaatttagagttggtgttaatgttttttgcggatattatagtagattttggaggttttttgtaaaggaattcgtaggatttttttttttttttggagggatgagattgtagttgggttggggaaagttgttggtttaagttggggttggtttagttggtgttggtttgttaggttgttagagagttttatttagggagaaattaatattataaagttgggggataagagaaggtttggaattttaagggttggttgttgaggttagttgtttatttttttgtgttttattttatagggatttaggtttgttagtgtttcgtttttggaaggaatgttgtgggttgttgtgttttataggtagggtggagggtttttttgtagttagcgagttgttttttttgtagcgtgtagagggaaggaggaggtttgtttattttttttggttttagtcgaaaatttaattataggttttggtattaggtagatttgtttatttttatattattattgtagagtgagttaggttttttgggtggggttgtgatgagtaggaaggattttcggagtgtttgggattttttgggtttagggttgttagaggtagagagaaagaagtttttttttaatatttgagtaaagatagttattagaatttattagagtggttttttgtggtttttttttgggtgttgatttttttggtgtatttgaagtttttagggatattattgacgttttttgtatttttatttaggggttagtggaaatggttttttttttttttgtttagaggtattgtggatgatgattttaggttttagattttagttattgggttacgtgtgtagataagtttgggtagttagtaatttttggttattaagttggttttttgcggattgggtcggtattggaggcgggttttagttgttagtattgtggtttagttaggtttggttttgggaaggtagagggggaggggattgggaaagggattgagttgggggtggggtggtattttggttttttttttttagatttttggtaggtttgaattatttggttgcggttttttaaggagggagcgtttttttcgttttgatgtggattttgttttttgtttacgttgtttttgtttttaaataaatgtggttttttgtggggagtttgggggtcgttttttattgatattgttgttttttggtttttttttgtaggtttcgtttagttttattgcgtttatttttaagtttttttttttggacggttttgttttttgagaatatatttttttttattattttaattgtgtttttttttttattcggagtttgttttatttgttttaggagttattttttttttttattaagtagtttaggttaattttggagggttaatttgtgtttttttagaagtaggttttgagatagggattttagtgggaggggatattaggggatgtttgagtgtgggaatgggttaggtagggaatttagttaataaagggtgttttattagtttattgtgattataggtggttgtttagtttttatatcgggtagtatggggagattgtagatcgtgtttttagttttgttttatttggggttgggtaagggagttggggtttttatattttagtttttggttaaggattgtattgtttattttttttagtttttcgagggtttgggtattaggaaaggttttgggtggagatacggaaataggttatgtgaagttagtgggcgtgattggtagtagtaaggttaggatagttttggttattagtaaggtgattatatattttagtatgtatagtttttatagatatatatttaggagatggtaattatattagtaatagttatttttgtcgcgtgttatgtttgtatttagggaattttattttttatttatttatttatttttatttgagatggagttgcgtttttgttgtttaggatagagtgtaatggtataatttcggtttattataattttcgttttttgggtttaagttattttgttttagtttttcgagtagttgggattataggtatgtattattacgtttgattatttttgtatttttagtagagatggggtttttttattttggttaggttggtttcgaatttttgattttaggtgatttatttattttagttttttaaagtgttaggattataggtatgagttatcgcgtttggttttaggggtattttattattttattattttttatagtaggtgatattgaggatattgaggtttagagtagattgtggttatgttatttttttgtttggtttttttgtttttagttttgaaataaagagtacggtttttgtgtaggtttatacgttttgtttttagttttggagtagtttttaagttttttgaaggtatattaggtttttgggtttcgttttttaagttttggataaataggaggtgaaggagtttttgtaattggattttattttgttagcgttaaggttttgtttgattatttattttattttatatagattagggatttgtgttaaggtttagtgttataggagagtgaagataaggaggtgtttatggcgtatatgttgttggatttattttgtagattttaagggttatggggagttatttgttaggtgaggttttttcgtggtttttttttgtaggtttagggtagtatatagggaggtgtttttttattttttggtattatttgttcggtttttttgagttttgattttggtttttagatagttagtgtttttttagggatagaatttgttttgttgttgtttagaggagatttagtttgattagggttagcgtttttggaatttgagtttggaattttattttgttttgggtagaggttacgttgtttttttttacgagagttgagttgcgtatgagattattttgattttgggttttattatttttttgtatgatatttgttttaggttggagtagggttttgtggttcgtttggtgttttttttttagattgaggtttgatatgtatattaggaagtgtttgatttggttttaggagttgggagcggtttgttaggtagtttgtggttagagtaggggttttaataatggttttttgtgcggtatatttttttttaaataggtttaggtttaggttgtttttgtttcgatttcgttatgggtttggaggggaaagtttgtatttggagggtggtttattgtggtttttttttgtgtagtagttgagatcgtaggtgtttgagaataggagaagttttgtgtttattttgggttgtgagatgtttttttagaggtggggatggggatgggttagtatgtagttatttatattttttagtttgttggtattaaggtttgtgtatgtgtgtgtttttttttttttaattttgtttttttaatatggagttttgttatttgtttaggttggtttcggatttttggtttaagcgattttttagttttaggtttttaaagtgttgggattataggtgtgagttattatgtttagttagtattaaggtgtgttttttaagagtaatattggtcgggtgtagtggtttacgtttgtaatcgtagtattttgggaggtcgaggtaggcggattatgaggttagtagattgagattattttggttaatacggtgaaatcgtgtttttattaaaaatataaaaaaattagttagacgtggtggtcgggtatttgtagttttagttattcgggaggttgaggtaggagaatggcgtgaatttgggaggtggagtttgcggtgagtcgagattgcgttattgtattttagtttgggcgatagagcgagattgttttaaaaaaaaaaaaaaaaaagaataatatcgatggttttattttttgaatatgttaagtgatttttatgtagtataagtattttagaaggtaggaaaatgtaatgaataatatttatcgttatttattttatttagagatcgttattttttgttcgggtgtgagtgtgtgtgtgcgtgtaaattgtatatgtgtgtatgaaatggaattaggatttttgtatatattttgtgttttgttatttttatttaatattttcggtattttttatttttaaaaatgtgattttaatgatggtgtaggtttttgatatatgggtttagaaaatttgcggaaattcggattgtttttaggttttgttagtttaatgttgatgtaaatgttttcgtacgtaaatttttttgtatttttgattatttttttgggataaatttttagaagtgggttaaagtatatgaacggtttttaggtttttggagtaagttgagatcggtggggattggagaagggatttagggaggtttttgggagtttgcgagattggagtttggttttaggggatttgaatttatagatgaaggagatggttggtaaaggtgggaattttttgttttatgggtgggggggtgatattgttttattttttagtgatagtatggggatttttttaatatgatttggtttcgtatttttttgatattgtgtacggtttatagttgtgatgtttagttgggagttttttttgtgttttttagttgtattaattttttgtagatagaggaggaagttgttcggtgtttttttttgttgcgtgggttttttgaatttgtttagttgggtttgtggatttgtgtagttacgtacggggttttaaaatttgtaaaatgataagtttacgaatattttcgtttttgtgggtgaatgtggatattttttggttgcgtttttttttatagggaagatggagacgtgtaaagtgataaggatttgttatttttgggtaggttatgtcggttttattgtgaggatggtggtagggggttttttaggaggtttgtatattgggaagagaggggcgatcgtgtgtgattgtaggatttagggcgtagttttaggattttgatgggggaggagatgttggggagttttgttttgttagtttggtgatagatattttttaatgtttttcggttgggtataatttataatgtttttcgtggggaggtaattgtttatgaggtatttttggtagggatgattttgttttattgttatatattttagtaatgaaataagaatttagagtgatgtgattttttcgatgatttttttaattatttggggtttttgtgcgattttaagaagggggaaggaggtagttttcgtttttttgggtttttgatgtggtagttttggaatggttacgtgttcgttggtttatagtgggttatttgtcgaatgtggttgtggtgggattggggttgggttggagagtgggtgattatattagttagttttattttgggttattgtgtagttaggggttttatttttttaggggtttcgttgtgagtgttttggggttgttggaataaattattggaaattaagtggtttaataaagattgattcgtttatggttttggaggttataagtttgatattaaggtattggtaggattatatttttttcgatagttcgaggggaggatttttttttgttttttttagtttgcgttggtttaggcgttttttggttttggtagtatttgtagtttttgtttttattacgtagttttttttatcgtgtttttttgtgttttaagtttttttttgttttttttttataaggatatcgagtattggatttagagtttattttaaatttaggatagttttatttcgggatttttaattatatttgtaaagattttttttttaaataaggttatattcgtgggtttttggggttaggtattagatatgtttttttgggggttattagttaattttttatagaattttagacgaaagtgaatttttataggttgaaatgggggtgaaggtttagtgcgttttttttttttgggagtttttttagggtttgtgtttattttgtgattttgtgatttagttttttttttgagatgaagttttgttttgtcgtttaggttggagtattgtggtacgatttgggtttattgtaatttttgtttttcgaatttaagtgatttttttgttttagttttttaagtagttgggattataggcgtttatttttatgtttagttaattttttgtgtttttagtagagatagggttttattatgttggttaggttggtttcgaatttttgattttaggtgattcgtttgttttgggtttgttttggttttttaaagtgttgggattataggtatgagttattacgtttggtatttagtaggttttggttgttttttttttttgagatagagttttattttgttatttaggttggagtgtagtggtgtgattatggtttattgtagttttgattttttggttttaagtgatttttttattttagtttttcgagtagttgggattataggtatatgttattatttttggttaatttttgtattgtttagtggagtcggggttttgttatgttgtttaggtttgttttgaatttttgggtttaagcgatttgtttattttggttttttaaagtgttggggttataggcgtgagttattacgtttggtttagtaggttttttagaagcgtttgaggtttggtgaaggtatggtgttatggagtagagaatatttaattttgttttcggggagtcggaatatatttttcgtagttaattttaatagttatgacgtggttaggatgatatggggagggggtggtgtggattgtgtgggaggttagtttttcgggaagggggttggagtgggtttggttttgaggaggatttttaagaggaggaggaggcggtggtatgttcgtttggggggatggcgtgagttagggtgggtatttttttatttaggtgttatttttttgatattttagtcgggatatggtttttttggggaagatggatatttttagagtggggtattttttggggaagatggatattttcggaatggggcgttttttgtttttattgtttttttagtatatagttgtatttttttgtagttttggaggttgtgagattttttggttgttatttagaataaattcgtttttgagtagcgtcgttttgatggtggggtggtttttgcgggtggaatagtttttgttgttttagagtttattgagagttagtgggtatgggagtggtgttggatcgaaatatttagagggattatagagttaggtagtaagtatagaggttagttagtggggagggagggatttatttatgaaaagatattaagtattgaaagagaggagaggatggttggggatcggtatatatgtgtattttgcgtagatggttaaggtggtgaggcgttagttacgtagataattggaggaaggaggagtgttttaggggaggggttagtttcggttttagaatgattcgtttgtgtacgtgggtttggttggaataaattattgtattcgtatcgtagatttaatcgtaagtttatattagggtagtttttgttttggtgtagtgttttcgattatgagttggttatggtgggggtgattttaaggggatttttaaggagggggtttatcggattttttagggaaggttatttgtttttttgggttggatttgggataaggtttttttttgtttagtttttgttttttaatttgatcgtacggaaggatgttgaggatatttggaagtcggtttttgttttatagtatttataggatagaggtatattatgtggggatagtttggatagtgtttaggaggtagggagtagattagaggatcgcgggaggttttgggaatcgtacgaggatttaggtattgagttttgtattttttggtattagttcgatgtatagtttggttttgtgtttatttcgtattttattttttttatttgtacgggggcggtaataatattttttatagtttaggtttaagcgggtgtagatgtgatgagtttggtaagtttattttattatatttagttttgggtattgaattttggattttttggttggtagaagtggatatttaatttttttttggggttttggggtttttgtagaattagaatatagttagtagtttgtatgtagggtgtagagggatagagggatattatgtcgggagtttatatttggtatatttttgattttggggtttagtgttttgttgttttgcggttacgtgattagttagaggttatggttggatttataggcgaatatagtttgtggatttgattttgtttggttttgcggtgttttattttatttttagttttagtttgtggagatagagtttcgttttgttagttaggttgagtgtagtgatacgattttagttttgtaatttttgtttttcgggtttaagcgatttttttgttttagttttttgagtagttgggattataggcgagtgttattatgtttagttaattttttatttttagtaaagatggggttttattatattagttaggttgtttagtgttttaaaaagggtttgttttgttttgtgttagtatttaaagattaggagatattatataaagatttagatttttatttttttgagaagtgaatagttttggttacgtcgggtttatattttttagggtagtgacggagttgagatagggtttgtgataattgagagttttttggagtttatacggttttttgtttagtttttggtggaggttgagtttagtgatttaggatttcgtttgtgtttattaagaaggagaggtgtttgtggtttagagagggcgtttataggagtgttttgtttaggaagttggtagttgaggcggttagggttagggggttgggttttttttttttttttttagtgtttgagtgtatttggaggaagagagacgggtgaggggaaggtattgaaattggttttggagcgttattattgggggttggggattagttgttatttttttttttgtgggtaggggaggtagtggtgggattttatgagattcggattttgtggtttggtgaggtagggagcggttggggagatattgtgggtttttataggggtgcgttgtgggtttggtttggggaaggagttggtgaatgtgtttgttatgtgggtttttttttgttttggttttgataattaggagcggttggtttttatttggagtgcggttgtggggattgtggaggtggtagttttttaggtattatttttattgttttcgagggagtagattttggtggagaggtaggatggttgtagggcgggagttggtggttggtattattgtacgggtttgtagtagtggatgggaagatgtaggagaggttgatgattgagaaagttggtttttgtggattaagttgggggagtcggataattaagtggttagaattttgggttttggtattagtttgatgtatagtttggttttgtgtttatttcgtgttttattttttttatttgtattgggggtattggtattttttatattttagggttaagcggttgtagatgtgatgagttcggtaggttcggcgtttcgtcggtattgaaagttttagtgttcgtttttagtgttattgatggggttttgtttttgttgcggttttgattggttatagttgcggttatttattattggaggtatgtttttcgttgtggttgatggtagaggtgtgtttgttggtggtgttttagtgtgtgttttggttggaggtgaggagggataaaaatagtcgcgataagaaggaaattaaggtcgggtacggtggcgtacgtttgtaattttagtattttgggaggtcgaggcgggtggatcgtttgaggttaggagttcgagattagattgattaatatggtgaaattttatttttattaaaaatataaaaattagttaggtatggtggttcgtgtttataattttagttattggggaggttgaggtaggagaatcgtttgaattcgggaggtgtcgttgtattttagttagggtaatagagtaagattttattttaaaaaaaaaaagaaggaaataaaagttttttttggaattagaacgtttttatgtagacgtagttggagggggaggttgtgtggtttgcgtcgtggttatggtaagatacgacgggtagtatttttttattttagtttgtatttttgttttagaatttatgatggtttttttaggatggggttgtttttttcgtttgttgagatatgaaggacgggaagagattttcggtttttatcgtcgtatcgtttgtttttttttgttgttttttagtaggaaatatgtcggagtgttttttagttatttatttattaattgtattttttttttttattttttagttttgaaaagattttttgaggtcgaggaggtcgagatatttaattttattttatttcggagggtttagatttttttatttcgagttattgtggttagttttatttagaaattttaggatttgggcgtgaagaatttagaattttcggttcgttatgtggattttttaagttaacgtttttttaaggcgtttttgcggagggtggagttttcgggttttaaggcggtcgagtcggtgtttcggcgtattgagttgtttattgatatttcgtttaagtaggtggagaacgtcggggttatcggttcgtttcggttcgggtttaagagggtcgaggtgttgggttataagacgttagaatcggtttttcggaggacggagattattatcgttaaattttaggagttagtttatcggaggatggagttttttgtttttaaggttttcgaggtgtttattgtttttgttatcgacgtagtttttaagagggtggagatttagatgtttaagtttgttgaggcgtttatcgtttttagtttagtttagattttggagaatttagagtttgtttttgtgttttagttgtagagtaggttggagtttaagttttagttttttgtggttgaggttatatttcggagttaggagggtgagtcgtagagcgttaggttttggatgttgtggtaatggggggtttggttgttggttttgttatagaattttggaggaagaagttggatatggggtggagggtgttattttggagatttagaaagatcggaatgtatgggggtgggggtttgtaagtttaggagaggtggttttttttgtttgatgggaatatgttaagatgttttaagcgggatttgaatgagagtttggaaagattttttgggttttaaggagttttttttatgggttatcgtgggttttgttgggatttttgtttgttgtgtgtttttggagggtttgggaggtttagagaatgaggagttacgtaggaattagggtaggtttatgtaggggtgtaggatagggtggagttgagatttttagaagggttgttatattttggtggtttttgtttgaggaattgtaggttgtttggatatgtttagtagaggtcgagggtttggggaagggaggagggacgtatgttttttgaggtttgtattggagtttatggtttggttttttttttttaggagggatggttgtggtagagggaggggaatatgaggagtattttagtttgtaggataaaatttttagggtattgggaaggggtgtttggattagggggttgtgtgatagttgtatacggttttatttgggggtgtttttttggcgagaggagagaggttatggggttttagtagcgttttgggagggtttaagtttatagtcgtgttgatatggagtttataggtaggggattggtgttagttttgtgggatatagggtttgtttggaaatgttaggttgtgggatatggttgggtttttttttagaagcgtgttttttggttttagtagggatcgtggttttatggggttatagtaaggtgttagttgggttagaagttttttaagagttaggtttgattttgggtataggattagaatttagtaatgtttagtaagttttttttaggttggataaatagtatagtttgggtttttgatttagttgttgttttttatttttaatcgtggtgaaatatataatatataatgtgtaattttagttattttgtagtgtacgttttagcggtatttagtatatttacggtgttgcgtagttgttatcgttgtttattttcggtattttttttatttttttaaattgagtttcgttttcgttagattaagttttttatgttttttttttagttgttggtagttattattttattttttgtttttattatgaatttatttgattattttaggaattttgtgtgtgtggaaaaatataataattgtttattttgtgtttggtttattttatttagtatgacgttttaaaggtttattcgtcgtgttgtagtatggggtagaatttttttttttttagaggttgaataatattttgttgtgcgatgtatttgtgttgtgtagttgtttttttatcggtggatttttgggttgtttttatatttttttaagtttttttttttattttttttgatttttttttgatttttttgagatagggttttgttttgttttttaggttggcgtgtagtggtgtgattattgtttattgtaatttttgttttttgggtttaagtgattttttagttttagttttttaagtatttaggattataggttgcgcgttattatgtttggttaatttttaaattttttttgtagagataggtttttattaggttgtttaggttggttttaaatttttgggtttaaatgagttttttgtttcggttttttaaagtgttgggattataggtatgagttatttaatttttttttggtttttttttttgaatgagagttttttagtggttagtgggtttgggggttgggaggatgtggggtttggagagggtgtgggtttggggggagattagtgttttttatgtttttatgggtatgtggagtgtatatttgttttggcgggtttggggtttgggattttgtattttttatagagggggtatcggaatatattgagtagttagaggttagtgggttttggaaggtttttttcggtttttagtgtgcgagtttcgtgtttttttttttatttttttaagtttgattttgaagagttattttgttttagttatttagatttagtgatagtggttgttggtggtatggtgttaggttaaaggtatgggtagtttgtagagtggtaggaggttgtttttttttttgttttttgttggtgtaggatttttgtttgacgtgtcggatatatttttattttgggttgatgtgtttatatttagttgagttaaataggatgtggttggggaggcggttgttatcgagttatttaaatttcggtgatggttggtgttggatgtatagggacgtggttttggttttgggggataggtagggggatgtttatggggatgtataagaatatttttttttaggggtagatatagtttagtttttaaattgtgttagagattgtgtcgggagttaggtttagggatataatttgcgggttttgttttttggagtttatcgagtcgtgagtaggatggttgggatataaggagtgtttagggagtttttttagtagtggaagtataattttattaggttaggaaggggagagaaaggtaggttacgtggaggtagtagcgtttagagttgttaggaatttggcgttttggggggacggtggttttttttatggaataggatgtatacgttggagtcggggtatgggagaaaattattagtattttagattcggttatttacggatagggatttgtgtaggtgggagtttagtttacgtggagaggttcgtgggttgggttgatagttttgagggtttaagtaagtttaggtggaggaaatgtagggatagacgagggtagggtttttttaatggaggagtgtttttgaaattcgatgggagtggtttttcggggggtttaggtttgagttttattagtttttttttcgaggtattatttgtttgttttttcgttttttttttttgtgttacgatcgttttggatacggatttagttttttttaatttagttttttgtttattttttttttaggtttatttttttttgtttttttatgtggggttgggttgggagttttttgagtttcgatatgtatagttttgattaatttttgcggtttttttgtttttcgagtattagggatttagttggtattatggggaaaggaattatggagggagtttcgtgttttttgagtagacgtttagttttttggtttttgtttgcgggagggtatttgtgttgtggtttgtttttattttagagttgtgggtgtagggtagggttttttggggttttagttgaattgtttttagattgatttttttaaagtatagtattgttgagattttttttcgtgttgagttttttttgtttatttattataggtttttttacggttgatttatttttttgtttagtttatattttttttttttttagttttttttgttttggtttttttttggttttttatatttttttttataatttttttgttttgattttttgaattttgatttttgtttttttttatattattgttttggtgaatttttatgtattttttaaaatttggtttaaatatttcgtgtttggtttgggatataaatgatttgtgtataaatttttttttttttgttagatttttttttttaaatgtgaaagtagttttttagattataaaaagtaatcgagtattttttttttaaaatgtaggaagtatagaaatgagaaagaatttaaaatttatttgtaagttagcgatatttatgtttgaggttttgttgtatagtttttaaaattttttttatgtttttattagattttgagggtagggttgttgtttttgtttttttttgtgttttttttttgttttttgttttttgagatggagtttttttttattatttaggttggagtgtagtggtatgattttagtttattgtaatttttgttttttaggtttaagcgatttttttgttttagtttttcgagtagttgggattataggcgtgggttattacgtttggttaatttttgtatttttagtagagacggggttttattatataggttaggttggtttcgaatttttgatttcgtgatttatttattttagtttttttgattttttaaagtgttgggattatgttatcgtgtttagtttgttttggtttttataaagaattttataaggggttaggtgtagtggtttatgtttgtaaatttagtattttggaggtcgaagtaggtagattgtttgagtttaggagtttgggattagtttgggtaatatagagaaattttatttttataaaaaatataaaaaattagttaggtatgatagtatgcgtttgtagttttagttattggggaggttgaggtgggaggattatttaagtatgggaggttgaggttgcggtgagttgagattgtgttattgtattttagtttaggagatagagtgagattttgttttaaaaaaaaaaaaaaaaaaaaaaaaaattttataagatattaagtaagtgatttggatataataggtgtgttatgaaattatgttgaaggagtgagttattggtggtgagttgggatggtttttttgtggtttttgtaggtagatgtagtgatttttatgggtcgtttttagagattaagtagaaatttttttggttaattttatttttaggatatttggttttttttttggaggttgtgttggagggtttagtgggtgggtgttggttttagtgtgggggttttggaaggagttagtattttaggagggagtgtgggtatttagatggttgaaggggagggagaggaagagaggcgttgtagagggtagaggtatttttgtttgttttttcgttttagggtttggtgaggtttgagttttatgttggtggggtggattttcggttttcgaggttttggttttgtttttggatttggtattttttttgttgtttttttatagaagggcgtttattttttggggttatttttggtttttttaggttttgggtggggacggttttgtttttttttttggatttttgttttttttttgttttttaatatgggtgtttttgggtggagtggggtggggttgggttgtagtatttagtattgagtttgtaagggttggttgttggtttagagttttttttattagagttattttttttcggttttttagttatattagttaagtttttttagagttgttttataaggcgggtgtttagcgttcgtttatgggtttggttttttgtttttttgggatgtttattgggggtaagagggaggttaggtttagtgtttagtttagttttgggtatgttttagttttgttttatgagttaattggttttgaattattattttattttttttagttttaattttttgatttgttaaagaggtatttgtagaggtggttgggggttgagtttttatgtatttatttattttaagaattaagaagggagtttatagtggttttggggttatttgtgaatatggatgtgaaattggggcggggtagatatggtagtatgttttagtagtttttttgtgatttagagggtttggaaatttttgttatgtgggtggagcgttgagggagtagggggttaggttttttcgagttgatgatggtgggcgtggtttttcgtatatttggttcgtatcgggtcgtgtgttttaggggtagaatagggaggaattttagtatagatagtagggttgttagtatagcgttgagtatagggttaattaaagtatagggttttttggaattatttaatatagagtagtgaagaggtggttttggggaaagtggggttagagttgagtttgagtggggggtggggagggcgggtattagtttgtaagggagggatatttattgggttttagaagtttttggtggggattagggattgtgaagttggggagagggtgattattgtgatttagggaggaagggttttatagatagtttagtttttggtttcgtgtttataggatattttatataggttttgagtttatttttggattgtggattttttgaggtagggtgtgtaggttcgtttagtattaggtgtaaggtagggggttttggtaagcgtcgagggatttattggtgtttgatgaagtagtgagtttggatcgtgttatgtttcgggttttgagtttgtaggatttttttgtggggttgtgtgtttttgtttttggaggtgtttagaaggtattgacgtttttgtcgggatgttttattcggaaggtttcgttgtttttatttttttttatttttttgagttgtttgtagagggtatttaggtttttttttattttgggattgggtttttttttttttttttttttaagaataagtatttttttttttcgaattgtttttggagttttttagatttaggtttagagtgggaagtttcgtatgtgttgggggaataggaattaatgcgggaggattggttaggttcggtgtgtttttttcgtggtgggacggggtggggttagagaatagagtttggttttagagtttaggaagagaattttttttttcgtcggtttgttaagtatcgtgtagtggtgagaggaaaggagggttggttcgggaatgtagcgggtgtcgagtagttgtggaatattttaaatagagcgtagttgcggggaagggtggggttaggaggtaggcgttgggggcggtttttttgtttcgttttttgtagttttgtggttttgattatttagtttggttttaggatggagtttcggtttttagatatatggtattgggtgaggtcgttttttagtatttgttttaggaagttagagtagttgttagaagagagaggagttgtgtttgtattcgtcgttttttaggttcgggatagttgtcgggattgagggtttgtataatggcgagtttgttcggaggggcgcgtcgcggttagatagttatgttttgtgcggtgtggatagagggtatatttagttttggaggagcgtatttagatttttcgtttcggggtttaaagtgtgggtagtttttaattagattttggattttagtagatagtttgggaggatgttatgtggtttattttgatatattgttttatttgtgattttatttttgagagttgtagggaggcgtttttttagttggattttatttttttttcggggttttttgtgggtgttataagtgattttgttttttttagtttaaggggggtttttggggtatgggttgtaattgataggttagagtagtttatggttagggttgagtttttttttcgttttttttgaatattgggtttaggaaggggttaaagtggagatgttttgattaaagttgagggaggtatggagtttttttgattttgtttttttattttattgttgttattgggtgtattttgtggagttttaggatttttaaagaatttagagtggagattttcggttttatttagtgtaggtgagggggaaagtgatttgtttatagttatatggttattattagtatatttgggttaagttcgattttattttacggtttttgtttgaaatttggaattggaaatggttttggaaattattgattttatttgtcgttttttaaaatggttcgtagaggttaagatatagatttttgtaatgttttgtttattcgtgtgtggggaaatggtagaggagtatcggttttgtttttatattgtttgggttgtcgtttttgttttgtttagtggtttttttttttggttcgtttttttattgtggaagtgggtataattttttttgtgtagcgtggttagagtggatagtgatgattcgtgaagtagggtggagcgtttgggggattcgtgttaaataagtatataaataaaagttaatataatttttatttaattagtaagtaggttttgtttgaagtttttgggtagtattttatgttatttttaggttttaggtcggtggtgtcgtttcgtgttttttttattcgtaagttggtgtttagaagttttgttttgtgttttggtttttattttttttgtgatttttttttttttttattttaaaaagtaatgtacgacggggcgtggtggcgggtatttgtagttttagttgtttgggaggttgaggtaggagaattatttgaatttaggaggcggaggttgtagtgagttgagattgtgttagtgtagtttagtttgggtaatagaataagatttttatttgggaaaaaaaaaaaaaagcgatgtttagttatttttagatagaaaatgaagattatatgaaatttggaaagaagttttttttttttattttttaatttttttttaaggggtggttatgttgatagttgggtgtggtatttttttgaattttatttttgtagagttatttagggtttgtgtaaaaaaagttaatgtgtaaatatagattttttaagaatataaaggaaattagatttttgttattagtttttattttttttatttaataatattgttgttatttgtagatgtagtacgtttttttttttttttttttttttttttttttgatagagcgtggtttaggttggagtgtagtggtgcgattttagtttattgtggtttattgtaatttttatttttcgtttttcgtttttaagcgatttttttgttttagttttttaagtagttgaaattataggtgtttgttattatatttggttaatttttgtatttttagtagagacggggttttattatgttggttaggttgtttttgaatttttgattttgagattcgtttatttcggttttttaaagtagtacgttttttttaatggttgtgttattagttgttttatggttttgttaggtttgtttagttttttattgtgattgagaggttgtaatagatgttttcgtatttgtatatgtgtatatatgattgaaggatgagtttttagtgaatttttgtgttaaggatgtgtgtatttaagttttgatttgttgggtatagtggtttatatttgtaattttagtattttgggaggttaaggcgggttgattatttgaggttaggagtttaagattagtttggttaatatggtgaaattttatttttattaaaaatataaaaattagttgggtatggtggtttgtgtttgtagttttagttatttaggaggttaaggtaggagatttgtttgaatttagtaggtagaggttgtagtgagttaagatcgtgttattgtattttagtttgggtgatagagcgagattttttattaaaaaaaaaaaaaaaaaaaaaaaattgatttttgtttttgaattggtttttaaagtggttattagaattttttaggattttttttttcgtcgatttgtttagttgtttgttgggttttgtgtagtgatggtttagtagggaggttttatgttttttatttttggttgagggttaaatgttttttaattggtgttttattttgtgtatttcggttaagcgagagggattattttttcgtatgttataggttagggttttgtgttttttttttatttggaaggtgtattttttttttgttgaaattttttaaaaagagttttttgtaagttaggcgtgatggttaatatttataattttagtattttgggaggttgaagtgggcggattgtttgagtttaggagttcgagattagtttaggtaatatggtaaaatcgtatttttgtaaaaattagttgggtgaggtggtgcgtttgtagtttcggttattcgggaggttgatgtgggaggattatttgagtttgggagtttgaggttgttgtgagttgtggttatattattgtattttagtttgggtgatagagtgagattttgtttaaaaaaaaaaaagagttatttgtatatttttattatagtaggtacgagtattttgtttttagttgtttatttttgattttgtttttgggatgtttttttatatagaatattttaattttgatattgttaagtttttgtttttttttttagtttttggaatttatattttgtttagaggttttttgcgttttgaaattataggaaagaattttatttacgtttttttttagtatttttgtggttttatttttatatgttgaaattatgaatttattggaatgtattttggttttagtagcgaggtaggggtagatggtattgtttggatatatagtagcgagtttggtttggagcgggtggggcgtgtgtgtgtgtgtgtgtgtgtgtgtgtgtgtgtgttatttttattagttttggtgtttgtattgtgttggtttagtaaaaataatttggatgtattttttttattttttgttttttggaatattttaagtagtaatataataatttttttgttaaaattttttaagaatttattcgtgaaattatttgagtttgatatttttgggggagtttagtattttaaaaatttaaattttttttatgggtttgtgagtttgggagtttttttttttttttaaaatttattattattttttttttagaaaagtgttttttagtttatttaaaattcgttagtttatttcgagggggttgttttagttcgtttagtgaggatagtgtgtagcgcggtgattgatatgattgattagtagagtacgatcgattagtcggtgtgtaaatatgattgattgtggttagcgttttgggatgttttatgttgaggtatatgtgtgtagtgtagggtgatgtgtattttgagaggggatgaagttataggatttttgtatttttaggagagagtttttttttttaaggttgtagttttgagtaggtagtgacgggattgggtttagggggttgagtggttttagtaggttaagggttttaggaattatgagaagtttggagttgtttagagagtagtttttaaaattagtttggattgtagtttttagaaagatatgcgattgatattacgaattaggatatatttatatatggggtgggggtggggatgggatgtattaatgaaattaaattttcgtgatggaatttttatttttattatgcgtgtgttatatttagtatttttttttttttttttttttttttttttttttttttttttttttgtttgtttgttttggagagagggaaggtttttttttatttttttttaaatagttttattgagatttaagtaagttattatataatttattaatttatttatttatttatttttttgagacggagttttatttttgtcgtttaggttggagtgtagtggcgttatttcggttgattgtaattttcgttttttgggtttaattaatttttttgttttagtttttcgagtagttgagattatagatatgtattattacgttcggttaattttgtatttttagtagagacggggtttttttatgttgaggttggtttcgaatttttgattttaggtgatttattcgttttagttttttaaagtgttgggattataggtatgagttatcgcgtggtttaatttatttatttaaagtgtataattttatggtttttagtttatttagagagtagtgtaattatcgttattataattaattttagaaaattgaaaatttgagaaatttagaaaattttttttttaagaagaaatttcgtagtttttagttattaattttgttttttttttttatattttttttttatttgtgtggattttttttttttttttttttttttttgagatagggttttattttgttatttaggttggggtgtaatggtttaatttttgtttattgtaatttttattttttaggtttaagttatttttttattatggtttttcgagtagttgagattataggtttgtgttattatgttcggttaatttttgtattttttgtagagatggggttttattatgttgtttaggttggttttgaatttttgggtttaaatgatttttttgttttggttttttaaagttttggaattataggcgtgagttattgcgtttggtcgattttagatattttttgtatagagaattgtacgtttggtttttgtgtttggtttttttatttggtgttatgtttttaaggtttatttatattgtggtaggtgttagtgcgtttttgagtaatattttattatggtatggattattttattgtggatagatatgttgtttttattagttgagggatattgggttgttgttatcgttggtgagtgtattttttttaaattaaaaaaaaaatgttggttattatttattagatcgtttttttggtttatagggtgggataagtcggtttgggtgagggttaggaggtggttaggtggaggcggttggagcggttttgggttgtttttgggcgtagtaggtagaggtgtaatggtagagtttgagtaggttttttgggcggatttttatgtcggtaatgtttgtttatttaagaagtttcggttaggcgtggtgttttatatttgtaattttagtattttgggaagttgaggtaggtagattatttgaggttaggagttcgagattagtttggttaatatggtaaaatttcgtttttattaaaaatataaaaattagttgggtgtggtggcgtgtatttgtagttttagttattcggtaggttgaggtaggagaatttgtttgattttaggaggtagagtttgaatttaggaggtggaggttgtagtgagttaaaattgcgttattgtattttagtttgggtgatagagtgagattatgttttaaaaaaaaaaaaaaaaagaaaaaaaaagaaatttttagtgttgttttgtgttcggtatcgaagtcgagggaaggtagtattagtatgagtttttagtttatcgggtttttgtttggagttgacgtgcgattaaggtatacgagggaagtatggcgaggtggacggtgcggaggtataaggagtaaaataaggtagatgtagtggtttagtggtttttggtggttgcgaggagcgtgggtaggatagttttaggagggtatttggagagtagggtcggttggggtaaggtgtgttaggtatttgttaggagtaaaatgtaaggggatattaaagagtttaggaattaatatagatagtatttaatgtagtattttttaatatcgaaatgatgtatagtaatttttatgatgaataaatgttggaattttaaattaagataggtttagttttgtacgtgtatagttttgttagagtttgtttagcgtggaatttgatttgtttaaaatgttgttttaaaatattgtttgatttttggattttttggtattgttttaatttttgtatttggacgaaggttttattttaattttagttggagagggttaagggttggtgaatttggttttggatttgtagagtttgtggtatttgagaggtggggttaggaataggaaggagttggtgagaacggtattcggtatgggatggggttagattagagtagtattgtggttttttttaattcgtggttttgttgttggatgtttggcgttggtgttgagttttcggttttttgaacggagtgtgatgaataacggggtcggggagtttttgggtttttttttgaagtagtagtgaagttagggatatgtcggtagtaggtagggagagggacgtttggtttgtgtttggagttagttgttttatggaggagttgggtgaggatgcggtgggaggaagatttttttagttttgtatttttcgaagtataattgagtgtttgtgtggtttgggggttattttggttcgaggatagttttgttttgtttagttaggttttgaagagttatcgggatacggatagtagttttgttgggtggtaggttgtttattttcgtttatttaacgttggaattggatgtagagtatttggatggttagttttagagtgtttttgatatttttagttattttattttttagattaggataagatgcgggattttaatttcgagttttttatgggttttattttatgtgtttttataagttattgggtttattttttggttttagggttgtttggttatttggtattttggtttttttatttgtataatgaaaataatagttttagttttttcgaggagttataagatgtttttcgtgtgaaaaattgggatttggtattagattatttggatttgaattttggttttattttttttaatttgtggttttgggttaatttggtttttttgtttttagtttttttatttatagagttattttattgagttgttgggaggatgaatataaggaagtgtatttatgtgtttagagtattgtgattttatttattattattaaacgaggtatataataagtgtttaatagatgtttagtgttattttacggattttgtgtgttttgtgtgtttttagtagttaagttttggaggtggggaagttgttgacgagttgtacgaggtaattagaaagaggaggttataggtgtaagggtttgggtgatatttgtggatagagagaggtcgatggattttggtagaggggaagggggtttttgtatatagaaaatgttttttgtatttaagatttttgtgattttggaatagaggtagtagaggtttgtaaattttaaattataaatttagaaagtatagaatattcgtagagaggattagaaatattatatattttagtgtgtatagaattttttatatagttaaataaaagtacgtttttaattgaagttgttggagagtttttgaggattttatattagataagggtcggtaagtggaagtttaatacgtaggagttattttttttgtttataaatgtttgtcgttttttttgtttatattcgtatttatgtgagggtatttataggtttatcgtttagttttatgttttgtttgttattaaaaaattttttaagaattttttagttgtaaatttttttatcggagggggggttttaggaatttagttttgttcggggttggggtattttagtatttgttgtataggcgttggttattaaaggttatgtgtcgtattcgtgggttttcggggtttggtggtatttgggtatatagtttagtggcggttttttatttgttagatattgggagtggggggttttttatttttgttttttggcggtggggggagtgtttcgagttgttatatattagaatttatcgatttatacgttgcggtattttatagttttttgatagttttttagtttgagagattattaaattgagtttttggagagggtggttgttgaggtttggatataggtgtggataggatagttttgttttatttcggagtttcgtttcggtttagttttttgtgggtttgaagtttaggttgggttagtttttgttttttagatggtcggaaaggtagtttagttttacggtttttttgttaggttttgagagtcgtttggtttttagttttgtttttttttttttttaagatggagttttattttgttgtttaggttggagtgtagtggtgttattttggtttattgtaatttttattttttgggtttaagtaatttttttgttttagttttttgagtagttgggattataggcgcgtgttattatggtaggttagtttttgtatttttagtagggatcggtttttattatgttggttaggttggttttgaatttttgattttaagtgatttgtttatttcggttttttaaagtgttgggattataggtgtgagtcgttacgtttagtttttagttttgttttgatttttttttaaggtcgtgaggatgtttacgtttttttttttttttacggtttattgatgtttttagatgttttgtaaagttatttttttttcgggagttttttagttggtgacgggggattttttggggattattgtttaggtagttatgtaggtttgtgggtcgtgtttttaggttggatcgagattcggtgtatggggtgtttttggtttgagttgaggtttttggaagttatagttaggaggtagtaagggacggttgttatgtttttttttttttgttttttagggtttttgcgggatagatttttttgtttgagttttttggttgtttatattttggttttttaaagtttagtttgaagttttaggtattttataatttgttttttttagtagtttgttttgttttttttttgtcgatgtttttgaaatttttttgtttttttttattttttggttagagagagattggagattttgtgggaattttcgaggggagggagaaggtcgttgtttgaacggaggtggtttttttttttgtttttttttaggcgggttatatttgtaggtttagttttttgttgtggtagcgtttggggtgtcggttgttttttgggtacgagttgggagttgagggaggcgtttttaggatcggagtggtaatttagttggaggaggagtaataggttcgtggttagtagtagtcgtcgtagggatttcggcgttgtatttgtgttttagttgatttttttcgtttttttagggtgggtcggggatggtggtttgttgtttagtttaggaagaagaggggtcgtaattagtagtagttattttaggggattttagcgttgtatttgcgatttagttgattttttttttttttttagggttggttgggaatggtggtttgttgtttagtttaggaggaagaggggttgtggtttttattttagaggtttttttttcggtttttttttcggtgttggtttaattgtaggtttgttttaggtcgtgtcggtatttgttgattgacgtttagcggatgttgataggagagggttgggatggggaagtagtaagtttcggttattgtgggttcgggttatagatggttgaggtattttttggttatttttaggaagtaaggttttacgtagttttcgatttatttattgttcgtgtgtattttaggaggttgtattttttaaggtttttattaggtaattttattgggttgggtgtcgttgtaaaattatttattgggtgcggtggttttttggtggggggtatggttggggaggatgcggtggaggagaagttagtttcgtggttggggggagggcggattattcgttttttgtttgttttttgaattggagtttatggttttttttttaggtgtttgggttatggaagaggttatagttttgttttatttttgtggtagtttaggggagttttggttagtttcgtgttttttgggagggcgatagtttggttaggttgtagggtaggattggaatgtagatttttgtttggttatgttgttgtttggttgttttgtttggggattttttgtttaggaagagagaagcgggtcggatagttcggtttagtgattggaagtttagttttttatgtttagtttagtaggaagtttgttttttcggaatatttgcgtgtttttgtatgtgtttttttggttggtggttttgcgaggtttttattgggttgcgttatgttttttggttattttggttttggtgtttggtttttgtgaaatagagatatttgggtagttttttatttgtgtttgtaagtttgtgtggttttagtgatggttgattttgttttatttagaggatttgggaatttttagtttaattgtttagaggagttttttttagtggggagagtttgagttgtttttttggtggatagttttttagattttaggcggatttttttgtcggtcgttttttttgttgtttttgtttttttgttttttatttgttttttatttttttttttgtagtagttagttggtacggggatttttttttttttttgggattgtgaatgagacgatttttttggtttttttgggtttagatttttttggtaatagttagtgaaatttttgttttaggtgggaggagaaggtttagtatgtggttataataacggttttaattatattatttttaaacgttggtttttatttattttttgttttgtttaatagttatttttattattttattttttagattaggaaattaaggcgtagagagttttagttatttgtttgaggtttttatagttaagtgtttggatttgaattttggagtagtttggttgttgagttgttttggagacggggtattgtgtagtggtcggggtaggggtggagttttgtcgtcgttgattttcgggttatttggagtgataatatagtttagtgtttgggtttttgtttgagattttggttggatgttaggagttcgagattttttagtttttttttgtgtaaggcgttatggggtgaaatgaaagaaaattttagttagaaggtgtttttttttttttttagttttttagttgttttggattttgaaataagatatcgttcgtttgtggggtgagtaggaatagattggaatcgtatttttttttttttagttatagttgttaggagtttatttttttttgttttttttttttgtcgtttttttttataagattgggttggatgttgttgggaaagttaataggaagttttttggttgcggtggaggtgggggtttgtgtttttttggggatcgagatgagggttttaggttggtttcggtaagagtagggaggtttacgtttttgtttgttggttttgttttttgttttgggagaaggtatttatatgttttagaatgtattttttgcgtgtatagggatggtttttgggttatttatttgaggtttattgatttttttttttggaattggagtggtttttttacggtggattgggttgagttttttgtttcggtcgacgtttttttttaggtatttttttttatcgtgttagggtgtaggttgttagtggatgggtttttattttcggggattggtagttgttacgtttattttatagtcgagatattttggtcgaaggttttgttaagttttatggagtgtagggattttttttgagacggtttttttttgtcgtttaggttggagtttaatggtttaatgtttcgtttattgtgatttcgattttttaggtttagtagtttttttattttagtttattaagtagttgggattataggtgtgtgttattatgtttggttaattttttaattttaatttttttttgtagaaatggagttttattatattttttaggttgaattttaatttttgggtttaaatgatttttttgttttggtttgttaaagtgttgggattttaggtatgagttattgtgtttagttggggtttttttttaattttttttggttttttttaggtgtaggattcgggttttagttttatgtgtttttgaatagttttgggttttgttttgtattttttgggcgcgtggttaggtttttcgtgatattagtaggagatttaggtgaagaagtaggtagaacggaatgtttgtttatttagtttcggggttaggcggggcggttaggatagtagtagtggttggtgtggttttttgggaggttagtttattggcgtggttagcgaatggggaggggagtttttttttttgtttttttttatttttggtttttgggtttttagggttaggtttttagagttttaggtggaggatggaggttagggaagttggggtaagagcgggttgggggtgggtggttaggcggattttggaaaattattttttgtaggtttcgttttttttagggagtatttagggttggtttcggggagtcgggttaatggttatttcggatggtgtaggggtttatttttatgaaatcgggtttatttttatgaaattgggtttatagaagtttttggtttcggttttgttttgttttttggtttttgtttttaaagtaggatttaggatagttttgaattttttgtcgaaatgtagttttttgggttttaatttagttttttagaattagagtttttggggtgggttttttgtttgtttagtagtttttaggggatatttgtgtttgttagagtaagtttaataagtattgttgtaaatttttcgtttttatagttttttggttcgtttttttttttttgttgggatttgtattaggattaaatgttaatattagggattaggttatatttgtgaattttgagataatatttgtattttttttttttttgaggttgttttgttcgttttgttatttaggttgaagtataatggtgtgatatttatttatggtaatttttatttttagggtttaagtaatttttttgttttagttttttgagtagttgggattataggtttatattattatatttggttaatttttgtatttttagtagagatggagttttattatgttggttaggttggtttcgaatttttggttttaagcgattcgttcgttttagttttttaaagtgttgggattataggcgtgagttattgcgttcggtttgatatttatattttgattaagttgttgtggaaatattgagttttttttgatagttttgtttatagagtgaatgtttaggaatcggcgaggtattttttatttttatttagatggcggtttggaggtagcgtttttgattttgtgatgggatttgttttttttgtttaagagattttagagatgtggtttttgaatgtgggggtttttgttggggtgggaacgggagttggttttggttattgtttagtgattttattttagtgtttcgattttagtattttcgattttagcgttttttttttttcggtttcgcgcggagattacgtggtttgcgttgagtaattttttattgttttcgtcgcgtttttgttgtagggaagtttttttagggagttagttgatatatttggtttttattatttgtttttgaataggaatgaaaggagagagtgagtaagaaagtggtaggaggtgggggttgtagagtaggggaaggttagagagaggggaggaaagatttggaaagtttaggtatgtgttttggaagtaggtgttagcgatgagtttatttggagggtggtcgttcgttttgagttttgtttggggttagtagggaatattttgttagggtatgtcgttgggagtttgtttttggtttattttttgttgttttgagcgttgagtagatttgtttttattttagggataacgtaaggaggttgttattttattttttattttattaatattttatgaattataagtgattatttattgcgttttgacgtattttaggcgttgggttcgaagttttatgcgttttatgggatgtatttgtattatcgtcgtagaaaacggtttttgttattattgtagagaaggtatcgaggtatagagaggttgaggaattggttttaggttatatagttagaagcggttgattttggttgtgaatatagggttgtttgattttaaagtttgagttggtttgtagcgaggtttatggtttttgtgttattgtttgagtttttggtcgagttttttggtttagtggggggtttagtgatttattagttgttttattatatgttgtggatatttttacggtttatttgggtgggagggaaggggttttaggaggtgggaggggtatagggaatatagtttagtttgtttgggtttaatattttgatttttaaggtattttttgagggtagtatgaggttaagtttttgtttttttttaggattttgtttttgtgagggtttcggggttttttgtttttttttgggggttttgttggttaggattatagagaagttttttgttgttgatttttttgtttttgtattttttggtaagttattttatgatttagttgttttgtttgtaaaatgggttgaataatattgttttgtttcggagggtttttgggaggattaaatgagatttgttgtatagaagttttttgtaagttatgttgattggcggtcgtcgggtttttaagtgaatgggtattcgggtattgagtgtgtggatttagtattcggaaggaggggttggggggtatttagaatttttgggaggtttggatttttgttttgtttagattttgagtttttttttggttagtttaatttttattagtagggtgagggtaattaggatttacgtatagttgggcgaagtcgagtgattatatgtggaagtttagcgttttttatgtaaagtgggtaggcggttaaagtgagttttgttttagtttttttattttcggggttgtttttggcgttttgtttttttttagagttttattgatttgtattatgtgattcgggtttgggaagatgggtttagttgtgggaggtcgtgcgggttggggattgagagtgtcggaggagggttttttaggaaaatttagttgtataggaagtcgggttagcggttttcggaagtttttgggttttgtaagttggattttttagatttgtggttgtggggtttttttttgtttgtagttgagagtttttgattcgtatttgagggttttagaggttcgggagggggatgtgatcgtgtttttagggtgaagtttattcgagtgttattttggatatagtttttatttttttttggttttttttttggttatggggacgttgtttggggggggtttttttatatggaaggagttgtagttgagttggcgggtttcgtatatttttaaggtcgtttgatttttagtttttaagtggggttgtatttattatttaggatttggagttttagttagagagggattttttattgtttttttttttgttttttgggaaaggtagggtttttgtgtttttttttatttagggatttggtatgttgggaggttaagaggaagttgtttttcgtttatttattttttaatttttttagttagtagagttttatttgtgtgtttagaatttgtgcgtggagttagaagttataaggttggtttagttgtgtttgattttggttgtgcggttttggatagttttagtttttttggagttgagtattttgatttgtagaggagaggttgttgtgtcggtttcgtagggttttgtgtagaggggagtgtgtgcggttgtgagtttaggttatgtttttagattggaggataggatcggaatagtgggttaggatggttagagggttttagttttaggaggaggtttttatattttttagtatttttatattaggaaatgtagttaggtttttaggttttttatgttaggaagtagtatttcgttttttatttttggttgtttgggtttgagaagttgagtatttttttcgaattcgagtgttttttgatttttgtttgggtagttgttttttttgaattgatcgtttgttttatatagttttttgtggtttgttcgatagggtggttagcgagttttttgtatagtatattttttttaggagtgttgtttgtgatgatggtgtaaagggtgttttttcgagttttcggaggtatgtagtggcgtaatagcgtgagtttaggagtttcggtgagtttttggatggagaatttgtttagattattttttagtttaaattttttttgggtgtttgttgtgtttggggcgttgatttatcgtggggcggtttgtgagattttacgttatttggttattttttttagtttttgtttattgtatcggttttttggtttggttgtttttggaatatgagggtttatttttacggaagaatatttatttgtttttttttggaaagtttttttttagattttttggtcgttttatttaggttttgttgaagcgttgttattttggagaggtttttttgttattcgtagttaaaatagtttttttatgtttgtgggtggttttttatggggtatggatgagtattggagagttttgtcgtttatttgtttatatgttttttgggagggtaggggatattgatttgtgttgtgggtgttttgtatgttacgggtgtttagtgaatgtttgttaagtattaggggagtataaaggagggaagtttttgtttaattggagtagttagggaagattttttggaggaagtggtatttggtttgtttagaatgtggcgatttgtttgtatgtagatattagattagagggtaaaggttattattataatttagtagatagttataagtagttaaggaattgttatgatatggattgttcgtgattggagttaagaaggagttagagatagaggtttttgtgttttggcgtgagtttttgggggaggttgagtttttagaatgtggggtcgtttgtgtagaggtcggaggtgggagatatatttgtgagtgtcggtgagtgtggggtgagttattggggttggattagaagatgggaatttttaaatttattaattagttttggtgttttgggagtgataggagacggggtttttgggggattaatttagtataagtggacgagatgggatgtaggggaaaggataaagttttttgaggttttgggaagttgagttagggtagagttatgatagggtgagttttagaagtaatataagaaaaaatagttagattgggttttttttttattgtgggagatgttttattttatttttttcgtttttcgggttttggtaatgggttgggtatagtgaatgggttttatttgtaggagtggttatattttttgggtatagttgttttatatattgtattgagatgggattcgaggtcgggaagaatagttttttttgtaggttgatattgttagttttcggggagggaaggacggtagggggtttggagtatttttttttgttatttatattttgtgtttgtttgtagggttttgagttttgtttgttttgttttagttttggttaggaatttgttggagtttataggggtagttaggttggaataggaggagattaggtcggtaggggagtcgagagggggttttggatagtatttagggttgagttattttgggtttgttcgatttgttatttggagttgttttcgtttgtttattatgtgtaaggttttgatttattcgggtttgtttaattagcgtttttttttaggtttagttagtttggttttcgttcgatttatttattgttattagtgttatttttgtattacgtaattagtttttgtagtatgttagttattaagtttagggttttttgtgtattttttgtaatttttatagtaattcgggaggtatagagaggttgagtcgttggtttatagttatatagtaggtatggggtattgttaggatttagtcggatttttgattttagggtttttttagggttttgggtgggatattggtaaggaagtaaggtatgaatattggttttgttttggatagagttcggggacggtggtttggtaggtttagttgatatagtgattttggtgtaggtttaattattggtaaagtgtttaagtatatatagaattttaattggggagataggcgaagcggttaagggagggttgtgagtgataggtggatattgtatttattggtagattagttgattttggtgttttttggagttttttaatttttttatttagaaaaagaggaattaatagttttatttttaaattgggtgggagtattatattcgaaattgaagtaaagttggtcgtgttataggttcggtagatgttagttgtgtaggtaatttagtgattatttgaagtaggttgtgcggcggtatttttattttgtagatgtagtttagagaggttagggtattaattttgggttatatagcgatagtttaggttatagagagtagtgttggatgggagggtgttggtagttttaggtataggttgggagggttgtggggttagtagagggagggtatattttttagttggtggggtttttttgtgttttagtatttatgtgggtttaaaggagttggaaggagggaggttagagttatttatgggtttagaagttgataagtaggttattgattttgaatttgttttatcgtatgtaaattggggataaatttggggatttaatgatataatgtaagaagtagatatgttatagttttggttatatagttagtgtataataagtggtaagtcgttagaggaggtagtcggtgagaatgggagtattttagtagtttttcgttttttgtttttggttgtagatgtatttgtttttggttatttgtgttttagtttcgtgtttttcggtgtgtgtgaggttaagtttttggggtggggatttgggggtgtgtttgtagtttttgaggttaagattaaggttgaggtcgaggttgaggttgaggttattttggtgaggaggaaattgtaggtggagaagttcgttgatcgtgattttgatttgatcgtaattttgatggtgtcgatgtcgttagtacgtaggttttttgttttcgttacgattggtttttgtagtttatttggttgagaggtgtgttggttttcgtaggttgtaaaatggggatattatcgttcgtttgggttatagcgtgttcgtcgattgtatttggggagggattgagggttgattgtgttgtggggatgttggtagagaattagagagggtatttaaaaaggttaatagttcggtggggagaggaggcgtaaggttggtttttgttttttgggttttgatcgaaagggaataggggatatatttggggatagttttttttttggaggaagaagggtttagggtgttggtgtggagtttgtatagatggggataatgagttggagggtgttgggtaggagttggttagtaataggttgacgagggaggttttgttggttgggtttggtttttaagtgagtattttgagttgcggggatttagggggttttagagattttagagttgagattcgggattatagaggggtgggttgtgtttagggtaatatagcggatggggtagatgttgcgaaatttgtttttttgttttttttttttttgttatagaattggatttttttagtttatggttgttaaattttttagatgtttttgggttttatgggcgttttatattggtttttttgtaggatagtagattttgggggttggttttgatggtatttattatggggtattttatgtaagtatagtgtttttacgtttagttttttagtttgtggagtaggtttgtgtttggttagttttattttgtggttagaggagggagatagtggttttggagataggagttggtttggggttgtttttttagtttttgtttttttagtttatttttttgttttgcgggtgttggttatttttttttcgttagttttatttttagttttttttgttcgagtcgtgatttgttagtagggggtagtggaggttttgaaagtttttggagaggattttgaagtagtttttataaatttgtttttggaaagttttttttgttatatttttagcggtttttttttttttaatattttttttggggttgttatgtagcggggggtggaggaatttattaggtcgtggatagagtagagttatgttgatataaattttggttgaatttatatgttttttatagttagcggtcgattattggaattagggaagtgattttatagtaagggttcgtagagtagttattacgtattttcgattttggtttttggatttagttttggaaaagaagttagattttagttatttggagttgtttagggaagattttagtttggtgtcggttgatagtttattggaattttttatttgtttggttaggtgatgttaaggggtagaggttagaagtgttaagaagtaggtcgagggtggtggtttacgtatgtaattttaatattttgggaggttaaggcgggtgaattttttaaggttaggagtttaagattaggttggttaatatggcgaaattttatttttattgaaaatataaaaattagttaggtatggtggtgtacgtttgtaattttagttattttggaggttgaggtaggagaattttttgaattcgggaggtagaggttgtagtgagtcgagattgtgttattgtattttagtttgggtaatagagtaatatttcgtattaaaaaaaaaaaaaagaagaagaataagaagtgttaagaagtatttgtttttttgattgaaaagtaatttttgttgggcgtggtggtttacgtttgtaattttagttttgggaggttgcggtgggagagtcgtttgaggttaggcgttcgagattagtttgggtaatagaggtgttaggggtagtggcgtttgtttgtagttttagttttttaggaggtttaggtaggaggattgtttgagttaggagtttgaggttgtagtgagttatgattatattattgtattttagtttttgggtgataggatgagattttgttttaaaaaataaaatataaataaaaaattaacgtttattttttgtgattttaaaaattatatttatttgtgataaaataattaaattagaaaatgtaaaggaaatgattaataataattgcgttttttagataaatattgttaatatgtttacgtttttttttagtttttttttatatagatatttaatatttattaatttgttttgaattaaagatggttttttttgttttgtatgagaattattttagttaggtacggtggtttacgtttataattttagaaagttgaggtaggtagattgtttgagtttacgagtttgagattagtttgggtaatatggcgaaattttatttttataaaaaaatataaaaattagtttggtgtggtggtatatgtttgtgtttttagttttttaggaggttgaggtaggagaatagtttgagttcgggaggtagaggttgtagtgagttaagatcgtgttattgtattttagtttaggtaacgggagtgaaatgttgttttaaaaaaaaaaaaaaaaaaaaaaaagttgttacgttgttattttttttagggatttttattttttttatttttcgtttaagatttgttttgtaaaaggatgaggttaaatagttatgggagggtggtattggatgtttaaaaaaatgtttcgtggttggcgggatttagaaataggttggggaggttttagtagagggtggattttagttgggggtggggggtagtaggggggttttttatatgttttttttgcgtgttttatggggttgtttgtgaggtcgtgtgaattagagttcggttgggaagttatatgttatttggattttgattttttttggtagtatgattttagttaatacgtttaattatgtttttttttgtaaaatgggttaatagaaatgtttattcgagatatgatgagaaataaaggtgtttatagagtaaagtgtttagaacggttttggtatgataggagtttatatgttagtgttgtcgttggtatcgttattattacggcggtattggttgttttgttttttttttgtttttgttattttttttttttagtaggtttttatttatttgtttatttatttatggtcgaggtttcgtttgtgttaggtttggtgttgagaacgggggtagagagatgggggttgtgttttgttttttgatttaagggttttttttgtaatgtgaagtttttggagattggatttttaggttgttttattagtttttttttaggttagtttaattttttcgtgttcgttttttgagttgttagaggaagagagcgggaggaaggatggagtggggtttttgtggggattgagcggggggtgtgtgaggttttggaaatggtgtttgcggtatttacgtagtattagtttttgttgtagttgttgtttggagaatatttttggattttaggatattgatgatagaaggtggaacgttttttttggaagttattaagaggggattatcgcggcggttgagtagagttgttgatttgtgagttgtggtttgattatagttattgtttttatgagcgaggttttttgtggttttttttttaggaatttttggttttttggtaggggatagtttagggttgggggtgggtagtggtgtttgtaggtttttttggagttagagaattttttgtcgtcgtggcggggttgtttttttttgttttttttttttcgttgtgtttttagttgtttcgataggatgtttttggtttgagagatagaaattttaattttgaatggttttagtttttaagagaatttggagtttttttgtgtaaaatgagatgttttgagtatcgaggatgttgtgggggattttttattttattatttttagtcgtggtgtttttttcggttataggatgttgtagttacgttgtagggaaggagagtttttttttttgtgagtttagggagtttttttatgtagtttttttattggttattgtttgagattcgatttggtggtttttgttttaaggagtagaaagggggttcgttaggttagggtggggttgggtgcgaggatttttttcggttaatagggtttgtttaggtgttcgttttgttggggtagtagggaagggatttatatgtggtattgggatacggagaggtttttgtgtttgtgacggttaaaagggatggcgttttagttacgtttttatttatttcgaggtttagtatggttatgtcggaaatagtagtatcgttttttttattgttttggtttgtttttaataggttagaggggtggggttggagcgggcgtttgatttgtggttggatttagttgttcgtggataggttgtgagtgaatttgtagaggaagggagatgggaatgtcgggatttttttttgtatttttcgaattttcgttttttgtgagttagatggggagtgtatttttgttttttttttttgggtattttttgcgtttttcgttttaggtatttgatgttgtttgtttattttttttttttgtttttttcgttggttttttttatatggttttaattaggatttttcgttcgttggtggatgggtagagaggggagtttgttgtggggtttttttcgatcgggggattttttagtatagagttttttggtttttgtagggacgttgtgtgtgtttgtgtgagtttggcgtgttagaagcgttaagttgtagttgttttgtgcgttttttatattttttattttttaaaggttttgggtttggtgtttgtgggttggggatttgtgttggggtttttaggaggtttttggtgggagaggtagggtttttttttttttaatttgggtaattttgttttggtttgttgtttgcggaaagtgttttaggatacggtggtaggattggttggggttttggttttaggtttagttttagtttttgttagatttattttttttgtgttttcgtttattttgtttattcgtagggtttgtaggagtattttgagagttggtagggtggtttgttcggcgttcgtatagggtttgttggtgggtggttgaggttgcggtgaggtttttatggttttttcgttttgtatattttttttttgttgtgttgtttcgttagtatatgagttcgtattgtttttgagtttgtagtttgttttttttattaggtggttaagtagggtggtagttagggtggtagagttttattggtttgtaggggattttttgtgggttgtaggtagttttttgtggttgaaggtgttttggtaggatttgtattatgattttcgttaaagtttacgtttaaggtatttgtgggtattttcgttttagacgtgagggttggtatttttttttgtacgtgaagtaaaggtttgtttgaaggagcgtgtggaagtttgggtgtgatgaaggtaaggatcggtggtttattttttttgtatttggattttgggtggtaggtttggggtttttagtttttaatttaggagggtagttagtcgttggaattaagagtgaattttagttgttgttgttatagttggagggaagaggggaaaggaggcgttgtaggggagtagagattttattttttttttgtcgatattaggttgtcggtgttggacggggttttggtaatcgtggtaggagtggtgatgttcgatgatggtaataagggttttttgaggatttcgagttgttttaagggttttttatttggagtaagtattttttttaatttttttaataatattgtgaaattgattttgttgttatttttattttatcgatgaggaatttatagtttagagatgttaagtaatttgtttaagtttttttttgagtatggtagagggagggttcgaatgcggaaagtttggttttagtgtttttatttttaattattgttatttattttttcggttagttttttgattgtaaaatttgaggtttagaggagtgtagtgatttggttagtttcgtacggtaggttagtggtagagttgagtagtgttttttatgttttgattttgtggttttttgaggtggtttatttttaaatacgttttttatggtggttttgttttttttttttttttgaatttgttagtttgtgtttaggtagggggagaagtagagtaattatgtcgggcgggtcgtcgtgttttagtgtcgtttgttttatatttgattggtagtagagtggtttttttttggtgtggtttggaggtgttagtggttatttattagtatagtttagttttatatatgttatttttaaaggatgttgatatagaatgaagtagttaggggaggcggacgttttggtacgagggtggcgtttttggtaattcgtagtgttgttgtttgtggttgtttttggttggtattttatttttttttggttgttttgtagttatttgagggaggttagtatgtcgtttttattttaggatagtgtgaatgtagtagcgtaagtttgttagcgtcgtattgcgggatttggaggtttttgtttttgagttttgtttttgtgtaatttttaaagtacggattttttaggggtttttatttttttatttggaaaaattttatatcgtttagggtttgaggtagggttagagtatggagacgttgttggaggattaagggagaattgagcgcgtgtttttttggttttagtttcgtgtgtgtgtttatgtatgggtattttgttatttatattggtttttacggttgggtgggagttgagttgagttcggcggttgtttttttattttgcgggtttggttggggagtgtgaggatgtttgttggaagttaacgtgtacgaaagagttaatggtggattttatttttttagttttttttttagtttttttagggaaagggtaggaatagagaggttttatttttagaggaaggggtgggcggggatatagcgttgttcggtatagttttttttgagttattttgtatgttttattttatcgatttttgtagtttagttgtttagagcggatttagaaggtggagagagggtttttaataagtagaggatggagtgaatgtgagatttattattgggatttggtaaagtaaagagttttatttttttttcgtagatgggacgggggcggggttggagttagcggggtgggggtatttagtaagagtttttttttatttttttattttttttgttatgggtttttttttttacgtagatttttagtttggaatgattagtgtttagtttttttcgttttttttttgtttcgttggagggagtgatttggtttttggtttcggttatttatattttttgttttgttgtattagtttcgtggtaggggttgcggcggaggtgggtaaaagtcgttttcgggtagttagtttttattttgggagtgattgaaagtttttgggggtttttgtagggtgagttgtttattttggttttggtaaggatatttaggagagggttagggtgtttgtatttggggtatagtataaagaatagtcgtaagtgttttttaggtaggagggtgtcgaagtattgggaagttgggatttagaagtattgtttggggtggtgagtggaagatgtaggatatagatttacgcgattgtgtagattatttggttttattttttcggtttatagtggaggaaattagaggtcgagagaggtgaagtgagttttttggggttatatagtttagttaggtttagggcgtcgattttttgttttgttttttcgtgtttattcggttggtattagtatttttgttttgatattttcgtgtggtagttgttgtgattttgtgatttttttttattttattttagtggggttttgcgagggaaagaagaatgttttatgtagaagtggttggaaagtaagaagtttggagagaagtgaggtttttgtggtttggtttgagtttaggatttatggtttggtttttagggatggagtatcgattttttttttttatatttttattttacgtttttaggagttttttatggggaagtcggaatggatttgggtttagagattgtaaatttattttgttggatgtgtggttgtttttatgtaattaatttttttacggagaagttaggggatggtttttagtattttcgggggttttttagtgaggtgggaggatttcgagaggttaggaggttgtttaagattttttgttttttagggattaggtgagggtttgtcgattgttttgattttttgatgtttttggtggggagattttagaggggtttgtcgttattatcgttagtggttttggtttgtttagttatttttttggggtggttaaattttatgttgtaaaagtttaagtgaattttagtagtggtttgggagaattatttgttacgagttaaggatggagtttttggggaggattttttgttgttttttaatttttttcgggtatatttttttgtagttttattttttgtaagaaagttaggtgtttttcgaagtttttttttggttttaggttagaggtgatagtgggggttttttgtttgcgttggtgattgtggttggttgttggtgtttggttttgttttgtattgtgtatttattgaaggcggtattattcgggttttttcggtggttatgtatgggtgagtagtttacgatatatttgtttttagtatcgtgtgggtcggggtttttagaggggttgagggtttggatggttttgtaggggggtgtttttggttttgtgatcgaaaggagttgaaggtttggagaagtcgttgggtcgaggttagtttttatagatttggcgaggagggaatagatgtttacggagttgttttaggtattgtatatattgttttattttgcgttgatagttaagaggttggtttttcgtcgatttttattttatagataatgtgtttttttagttttttagtggtggagttaggattcgaatttacgtaggtagttttttgggtttgtagttttattttttatttttttttaggatttatgttttggggttggtaggataatgatttttagagttgagtatattttaatttttagtatttgggattacgttaggtgatatggtagggttagttaaggttattaattagttggttttaaaatagggagatgattttggatgatttatacgggttcgttgttattataagagtttttaaaagcgtaatagattatttgaggggtgtagtgggagaggtttggaaggaggaaggaggttataagttaagaaatgtaggtgaatagaaaatgtaggaaaacgtagttttttttgtagtttcgggagggtgcgtagttttgtggatattttttttgtagtttagtgaggtggagtgtgggattaatttgtgttgtttgatattataagtgtgtggttatttgttatagtagtgatgggaattgaatgttattaggtagtagtgtttttatttcggaagaattaggataaatttttttgtggattttaagttttgggagattttgggtttttttggattgttttagttttgtaattataggaaaggttttttatgtttgtttgggagaagaaaatttcgtagtaaatttatttttttttttgataaatgaaggcgagggtgtgggttggatatatgttttttttttgtggattttttttgttttaatatttagaattttgtagttgaaggagattttggggggttgtttgtttgatttgtaagtgaagaaatggaggtttagggaagttaagtgattggtttagggttatgtagagttatgttggaatattaagttagatagtttagtttttgttttaaagtgtttttttttttggttggggaggagggttggagggagtggatttcgagtaatagtagtattggtaggggttggaagagtagttattgtatttaggtgttggagtttttggttattttttgtaggaattaggtgatttattatggtataggtttttttttgtttatttgtagttttgggggttttagggattagaggatattttggtttgagggttggggtttgagagaagagatggaagtatttttagtttggtttgttttcgtggcgttttgtaggtatattcggtagtttaggggttttagagaatttggttggtgggcgtttttattttgtcgtagttgtattttgtggttagtagtttgtaggatttgggttgttgtttgtggttttgaaatagttattttttgagttgagtggggattaggtgagtagatttttatattttaattgttgtgatttttttgttttggaggttggtgggtagtttggttggtgttttatggtattttatgatcggttttgttattaggttcgtgagttgttttttttttttcgggtattttgaacggtttttttgagagtttcgttttgggttttcgtttttgtaggttttcgttgtttggggcgttttttttttttggaagttgggtttttttggggatttattaagaagggttttgtcgagtgttgttaaattgttttatttggtttttatttgttttatttattattttattttaatttttatgttttttttttggttttaagatttgagtaggtagggtttgtgaggtattttaggttttttgatgttgttagtatttaggggattgttagtatatatgtagggagggaaggaatgaaggaagagatgatttggggagttttttagtttttatttgtaattggtatattgcgataaaatatttatggtattttattttttttatatattttttttttaaatttatttttatttgagatggagtttcgtttcgttatttaggttggagtgtagtagtataattttggtttattgtaatttttatttttcgggtttaagcgagttttttgttttagttttttaagtagttgggattataggcgtttattattacgttcggcgaatttttgtatttttagtagagatggggttttattaagttggttaggttggtttcgaattttcgattttaggtgattcgtttgttttcgttttttaaagtgttgggattataggcgtgagttattgtatttggttttcgtatatttataaaagagaatttgtttagaaaattttttagatgtatttttagggttttaaggtatagatatatgaagtttgttagtgagtagttgttgtttattttttttttttttttaatttagagcggtttgcgttttaagcggatagttgtttttttttttttggttttttgttgtttacgtttttatagaagtagggagaagaggtaggaaggtgacgcgtgattattcgttgggcgttcgtatagtgtcgtttgtataggtgttattttttttatttgttatttttttcgttgagtttttttttttttttgtagatgagagagtattgttttttagaggttaagaaatgggtttagagttatttagttgattagcgtgtagttagatttgaattatattttgttgatttttatgtttgtaggtttggtttgatgagatggatagttgggtggtggagattttgagattttggatggtttttaaatagggtttgtagtttttggatagggagagtttggtataaagggtttgtggagtgagttgggggagaaggtggtttagggtttttgtttttgaataaatagatggaggggttattttagcgtttttttagtttttggtgtgttgggtttttggttttgggaggagagaatggagttggtttttattttgggttgggttggtttgggtttaatttagataagttttttagtttgttatgagtgatatttttgtttgttttggtgtttttgttaaaaatatgaagggttttagaatttttatttcggtttgttttttttttagatttggagtgggtttggggttgataatagttttatgttagatagtttgagtagttattagtgttattaggtttgatattgcggtttttgtttcggagggaaaaataaggttttttttgggggattttttgttagtttgtgaaaataggtttggagttagttagcgtttttatgtttagatatttcgtgtggtttttaaagtgtttttatgttgttagtttatatgattttttttaaaattttataagggagggtaggaagtttgagtaatagtttgttaagtatttatatagtaggtggttttattgttttttatttatagataagtaaattgagttttagggtggttatcgtttgttttttaagttatttagttatttagttacggaagaggttatgattttttatattttagtgaagttgaagattttttttttcgtttttaaaaatgtttattttttagggtagtgaatatttggtgtttttgtttagcgtaagaggtgaacgtttgttattttcgtttttttttttttattagatttgattttttttttgtgacgggaatattttgtaggtagtttgttttgtttttatagattttgagaaacggggtttaaattgtcggttgtgggtgggataggcgatattgtagtgaagaggtggagtatttttgtagcggggaagaaatatattttttttatttttttaggtttagtgtttgggggtttgtgaattaaatttatttaagataaattaatgagagaaaagatagatttaattatatacgtatgggattttattgaaaaacgtgatttaaaagagtaggtagaaggtggggttcgtgattggttcgaaggtagtgagttattttagttgattgtttatagttagttatagattagattttttgttttattgttttttttttttttatttgttttgttttttttgagttagagttttgtattgttgtttgggttggagtgtaatggtacgatttcggtttattttaattttcgtttttcgggtttaagcgatttttttgttttagtttttcgagtagttaggattataggtatttattattacgtttggttaattttttgtatttttagtagagatagggttttattatgttggttaggttggttttaaatttttgatttcgtgatttgtttatttcggttttttaaagtggtgggattataggtatgagttattgtatttagttaattagttttaaaaaaaaaaaaaaaaaaaaaagaatttagggttcgtatattattttaataggaaaaaaggaaggggtgaaagtatatattatgggtcgggtgcgatggtttacgtttgtaatttcggtatttcgggaggtcgaggtaggtggattatttgaggtcgggaatttaagattagtttggttaatatggtgaaatttcgtttttattaaaaatataaaaattagtcgggtatggtggtgtatatttgtaattttagttatttgggaagttgaggtaggagaattgtttgaatttacgaggcggaggttgtagtgagttgagattatattattgtattttagtttgggtaatagagtgagattgtgttttaaaaaaataaataaaaaaaaaaaagtatatattatggtaaaataaatgagtttttggaaagataaataggtttttaggagttgagatgggagatgtgaagttttgtgataatgtttttttaggtgtggtgtggaaattatttatattttttagggaagagttagttgtttttagggagtagatttgggtttgtatattattttaataggggaaatggaaggggtaaaagtatatattatgggttgggtgtaatgtgtttagtgtaggaggtagacgtggtttatggttgttgttgaaattagtgtagggttcgattgttttgtattgagtgttgaggattttggttttgtattagttatgagtttgtagttttgggatatatttgatgttggtttaaggggaaatgaggttggaggggtagggtggttggattggatgtgggtttggggttattgttgatttataaagtggttattatacgggaataatagagttggttatagattataattagtaatattatttaaaagtaaggttatatttttaataataagttatattttaagttattattaatttataaaatatattgttggtataatgatagttttttaagaaggatataaaaaggtatgttgggttgggtgtagtgatttacgtttataattttagtattttgagaggttgaggtcggcggattattttaagttaggagtttgagattagtttggttaatatggtgaaattttgtttttgttaaaaatataaaaaaaaattagtttggcgtggcggcgtatgtttgtaattttagttacgggggaggttgtggtagaagaattatttaaaatttgggaggtggaggttgtagtgagttgagatcgcgttattatattttagtttgggtaatagagttagatttcgttttaaaaaaaaagaaaaaaaagaaaaaaagtaaaaaggtatgttgaaggtatttgtttgtggaaagttgtaatttgacgggaggtagggcgagtattttttagaaaggtggaaatgggtttttttgttatagagatttataaatatagattgaggtttgtagtttaggagatttaaaagaggtaaaggtgaataagagttaaggtttttaagttagggtttgattttgggggtgggggttatatatgatggaggatgttaggagggttttttggaggtggtgatatttattaggggggattttaggtggggtttgcgagatagtaggatttggttgaagagcgtaggttttttagataggagtgggaatttaggtttgaaaatgagttggttagattgtaggggttttcgaatgtaagggaagaattttaattttaatagaggagtttgggaagttgtttgggaaaaggagtgataaagcgggaggggttttttagtagagttttgtatgggtaggagggagcgagatgggaggtgggtgttggtaagggatgattttagtggtttaggggagtagttatagggtggaaattaattttgtggggtttgggtaggaagggattgatttgagatatcgggaagaaatagttagtaggattttggtgagagggttgggggtcggggaggggggtgtggagagtgggagtttgagtttttgaaaatagatagtgttttaagggggagatttgaggtaagatgtggagaggtagttgagttgggaagttggaacggaggtgtggttattttaggagattaagttagggggcgaggggatttttgggagttatttagattttagtattagggaatacggaggggagaaggaggggagaagaattagttggtgcgtgttaggtattgttttcgaggttagatggggtggggttggatattggttatgaggatttttttaagagttgggttaatagtgagacgggcggatattagatggttcgggttaagaagtaagtgggcggtgggaagttagaagtcgtggtgtagatttattttgagaggttgggttgtttagatagggagaaagtttatagtttgaggaggtagataggttaaaggaagagggtttgtttgtttttgagattggggtattttgaacgtttttttaggttaagtgagaagaaattagaagaggaatatgttatttaaatgtgttgaaatagtttagtagttgcgttgttttatagaaaatgtgtagaggtttttttgttttattatgtttgtttggggacggtttttattcgggttatttagggtttttttagtttgttaatttaagggtggtaggagttgtgggtgtttttagtttttttttaaggttggtttgtgggtagaaatgtgggttgtttcggggcgttatagttataaatgtatattagtttttagaattatatttttgttttttagttttttttttcgtatttttatgtagaagcgcggtcgttagtttataaaggatagggagggatattgtttttggtatttgatgggaagtatttgttgtattttattggggtgttgtttaggatggattggaaaagagttggtaggaaggttgagttttgtgtttataatttggtttggtggtggtcgaggagtttggtaggagtagagtgtaggatttgggaattgggggttggtgtatgtgtgtacgtacgtgtgtgtgtgtgtgcgtgcgtgttgggtgggtagggaggaagttgtgaaattatatttttttttttttgttgttgtgttgttgtgtgttttagtagtacgtgggtgttattatattttttagtaggtgttaatttttaagattgttttgggttttttttttagttggttgagttggaggtgggagttttaattgttttttgtggtttttagagtgggattttgttgtgggataggttggttaatggtgtttttttttttgtgatttttttgttgggtgggttacgaggaaggattgtgggtgttgtttatagataggtggatatgtggtaaggatattttgggattttttttttgacgttttttgaagggggtatttttttagttttgagatgagtttttgtggatgtgggaagtttattattttaagagtagtagttttggaaaatttaatatagaatttcgagtaggggcgggaaggggttttgtttcgtttattggttgtttggtagagttttgtataaggaagcgtttgtgttgttgtgggcggaggaatggattgagggttatattcgttttttgttgtcgttgtaattgtttattataaatttagtggtttaaagtaatagaggtttttttttttatagtgttaagggttagaagtcgattagttttatcggattaaagttaaggtgttggtagaatttatttttgttttttttagttttgggtgggaggttttgttggagttttttggtttgcggttgtatttttttagtttttgtttttatttttttatagttttttttttttttgtagttagatttttttttgttttttttttttttttttttgagacggagttatttaggttggagtgtagtggtataattttggtttattgtagttttcgttttttgggtttaagcgatttttttgttttagtttttcgagtagttgggattataggtatgtgttattatatttggttaatttttgtatttttagtagagatagggttttgttatgttggttaggttggttttgaatttttgattttaggtgatttgtttgttttagttttttaaagtgttgggattgtagttatgagttattatatttggtttgttttttttttaaaggacgtttgtgatttggggtttatttgggtaatttttttattttaatatttttagttatatttatagagtttttgttgttatatgaggtaatatagtttgggaagggagagttatttagtttattttaggggtttgtggtgtattttagggtttttttgattttaagatataaagtaagaaaataaattggtttaaggggaaaaaaggatacgttgaattttgttgttttaaatgtatatttttttattgtgttaaaatgtatagaatataaaatttgttattagtaatattgagtatatttatagtgtcgtgtaattattagtattgtttagcgttagaatttttttattattttaaagggaaatttcgtatttatgaaggatttattttttattcgttttttttagtttttggtagttattagaatgttttttgtttttataaatttatttttaataagtgtaattttgtgtgattttaaaataaataaatatgagtacgatgagttgtttattggaaggatatttatgcggggaggtcggcgtgtggagtgcgtaggttttcggacgggtaggagttgaaggggcgtggatgtgtcgtttttttttttttttgttttttttttggggttattgtttgagtatttttttttgtaaatggttttaaataatgttttagtttttacgtttgtatcgttttttagttttaggattttttattaaaaaatattttaagttttagatttatttttgggaaaattttaatggttttatttttttttttgagttagttagattttatggtttgtggcgggttgtttttgagttttgagtatttgtgagttagggaagtaggataggtatatttagggaaggggaagagtcgtcgttagttatagtaattgatatttttggaatcgtttaagagatatttagcgtgtgtttaaaatatttatttttttttttgtttgttttttgagacgaagtttcgttttgtcgtttaggttggagtgtagtggcgtgattttagtttatcgtaatttttttttttcgggtttaagcgatttttttgttttaattttttgagtggttgggattataggtatatattattacgtttggcgaatttttgtatttttagtagtgattgggttttattatgttggttaggttggttttgaatttttgattttaggtaatgtgttcgttttggttttttaaagtgttgggatgataggtgtgagttaatatatttggttatatttattttttaggagaagttttgtattttttgaaagtgaaatgtttttaggcgggtgatattgatggtgggatttgtggttttattagtgttttatgagagatgtcgttgtgtgttttattaagttgtattttattgttttttaaatgtggtttgtagatatggtgtcgagaatgatttgggaggtttaaattataatatggtttaaattaatagttttttgatgatttggtattattttaggattaaattgagattattcgaggatgggcgtggtggtttacgcgtgtaattttagtattttaggaggttgaggcgggcggattaattgaggtttgtagtttgagattagtttggttaatatggtgaaattttatttttattaaaaatataaaaagtagtcgtcggatatggtggtgtacgtttgtagttttagttatttgggaggttgaggcgggagaattgtttgaatttaggagacggaggttgtagtgagttaagattacgttattgcgttttagtttgggtgatagagtaagattttgtttttcggtaattaaaaaaaaaaaaaaaaattgagatttttcgagttgtattgtttagtatgatagttattggttgtacggggttatttgaatatttgaaatgtggtgattttaagtggagaggtgtcgtgtgtgtgaagtgtattttgggttttagagttttagtaagggggaaagaaaagaatattaaatatttgttatttttatattgattatatgttgaattgataatattttgggttttgttaagtgaatgatattaaaattaatattatttgtttttatattttttaatgattttttttttttttttttttttttttttttttaaatatggggttttatattgttgtttaggttggagtgtagtggtacgatttcggtttattgtaatttttgttttttaggtttgagcgatttttttgttttagttttttaagtagttgggattataggtggttgttattatgtttggttaatttttgtatttttagtagagatagggttttgttatgttggttaggttggttttgaatttttgattttaggtgatttgtttattttagttttttaaagtgttggtatgataggcgtgagttattgtgtttggtttgtttttatattttttattgtaggtgttggaaaatgtaaggttgcgtttgtggtttatgtgtcgtttttgttggagggttggatcgagggttagtcgagaaggttttggggttgttttatttgaatgttgagtgtgtgttgagcggtagagaattttgagaagtgttgaaggatagaggttttgtgtgggggatgtagttttaggtcggagatgttttttttgtgttttggagatttttatttggtgatagtaagaggaattattgtaagaggggcggttattttagtaaagtatttaggatgttggttttttagtttaggaatttagaggtagaggaggggaggaggttgggtttggaggagagtagggttttgggttttgggaaaagtttggggggttagaaagttgggggatagattgaggttagaggtaaagagaagaaggttcggagaggagggttaaggaagaagggttttgtttacggggagggagaggtttacggggtaggggcgtggtgggagttgtattttcgaggttttttgttgattttgatatttggttagaaaggagttttttttggtattttttgttagcggtttttggagttgttttttaggggttagtgatgagggtgttttgggttgggttgtagatagtggaaaagataggttttttttatttttagtgttggggaaattagttttttggaggaagggggagttgtattttttgagtggtcgtattttttggtttagacgtgtgtgttttgttgtaattttggcgattggtgttggtggtgtttattttatggatggggaaggttaaattttatagatattgagtgataggtttagggttttggattttagtgtttgatttagaatttaggtttttgatttgttattagttttttttttatttagatgggaatagggatttcgggtatgtagtttttttttagatattttttcggttttggtttggcgttcggagattagtagtagtagttttttacggtcgtttattgtgagggtggggagggtcgtgggattaggaggttttagggggaaagttggttatgaggagtgggaagcgacgggttagatgttagtgattgttggttggggagtcgttggacgtggttggtttgtttggttagtgtggcgggtgtttcggggttttagttatttttagttacgtgtgggggtgcgggatgggaaaggtaagagtgtgtggagtttagttagtatttaatatgaggtttcgtgggggttgtttgagggcgtagtttttagaatttagtttttggtttttagaaggtgttattaaaggtttttttttatttgagtgaattttttttagtttttagtaagttttcggaacgagtttatttttaggcgtttttttttagtgtgggagtggttacgtttttgttgggagtgatttatttgggtttagaggtcgtggtattgagatgggtttggtagattttagcgtttaggtttagtttttatagtgttagtttttttttttggggatttttttgtttgtgtttttttgggttttagtatattttaggtttgtagggagggggagaggaagagattgatttattggttaggttttttaggggttggagaggttggagaggtaggagttggattagatttgaatttagaggttttcggaggaagagtttagggtgagttgcgtttttattttttgtttttttttttttgtttttttttttttttatggttttagttagtaagtatttggggtagaggggataaatttaggtggttgtgttttagttttggttgtaggtttgaatggttttttggggtggttggttatgttttttgagagtttagttgtggcgatgtttgagtaggtaggtgggggagtatttaggaagtaggggtgttaggtagagtataaggagagagggtgtttaggttagttttaggatttggttgagaggagggggttttttacgggtatcgtttttggtaagtatagggataagggtaaggacggtatggttagaggtttttgggagttttttttttttttttttttttagtagtttttttttattttttttagggattttgttatttttttttagcgtgtggtagttttttggcgtttttttcgtgtttttaggttgtttttgcgtcgggtttgtcgttgggcgtttttatttttgtttgttttttttttttgtttttttcgttttgtttttttggagtaattttttatcgagtttttttttttaggtagtcgaggtttttttttatttttgtttcgcgttttgggaggttttttgtttcgcgattataaagtttttttgattttttgttcggttttgagttatgtgattcggtgggcgggtcgcggttttcggcgcgtttagcgtagttcgacgtttcgttgttggggtgagttttgtttttttgttttttttagttttgtattattggttcgggggtttttaggtggcgcggtcgcgaggcggattttgatggttatggtggcggtgtcgggagttacgttgtttttgggtttcggttcgaggtcggtaggatcgagcggggtttttaggagaggggtggcggggagttcgatttttacgcggggattagattttcggttttaaaatagaagaatagggttttgtgtggttatagttatttttttgtaaatatttggttaattaagttgagtggttaagtttttttgttgttcggagttttttggaatatgtttttttttcgtaaggggtttttttggtttttaggagggttaggaagaaattcgaattggttatcgttttttttaaaattatttcgtttaagttattatttttttgggttttcgaagatcggttggttggaggttggagatagttttaatgttcgaaatgtcgtaatcgaagtttttcgcggcgtcggtattgggatttagggagttgttgttatagcgtagttttggatttttggatgtgttggatatgtgtagggcgtttttgggaggagcggggagggagggtgttgttggcggggttggtttgcgtgtgttttgtttttttataatggtatgttgcgtgtcggttatgtagaggtatgttagtgagtaggggttgagggatttttttaacggatttgtttttagagggtttttttatgttgggagaattttagagattaaattatgtagttaacggggtggttttcggttttaaagtagggaggggcgaggagttttgtaggtaatgttatttgtttttgaaacgtcgttttagtgattttggggattgatttagtttttagtttgttgtattttatttttggtttttttttttttgtttttttatgtgaaatttgttgtgttttggttagaggtttggggaatagttttttgtttatttaagataagtttgtaattttttttttggagaaaaatatgttattcggaagtaggttgagtagtggttttttggtaggtttgttcggggttgtggagatagtatttgttggattaggatggagttggaatttggtttggattttatatgagaaaattcgttggaagaggaggaagtagaaaaaggttttattttttaataatgttgtgggttttttttttttatttattgttattttgttttgaaatttaatggggttacgtgtgtttttatgaatgttattttttttggttaattttttcggtagttttaggagtttttttttaggaaaaggaagaaggtgtttgtttagtatttagtatacgagtttttgttggaaaggtgggatttttgtttttttttgggttttttttaggttgagatgtggttaaggaaggtttgtggtgtggttcgttttttttaatgttcgtttttggagatttgagttgttgttgatttttagtttgttttttttgttttttggttatttttgtgtcggggtggttgagatattattgtattggttattttgtgtttttattagttttcgtttttgtaggttgttattgtgatggtgatggggttaatttagttgcggtggggaggatttattgtgtgcgtttggggggtggcgtggggtattttgggatgagaagatgcgatttttgttttgagagttttgttttaatggaaggcgggggtatagttgtaggtagaagttattaagtattgtggttagattagtattttatgttaaaaatggttttgttggtcgggcgtagtggtttatgtttgtaattttaatattttaggaggttaaggtaggtagattatttgaggttaagagttcgagattagtttggttaatatggtgaaattttgtttttattaaaaatattggttaattcgggtatggtggcgcgtgtttgtaatggtagttattcgggaggttgagataggagaattatttgaatttgggaggtggaggttgtagtgagttgagattgtgttattgtattttagtttgggtaataagagtgaaattttgttttaaaaaaaaaaaaaaaaagttttatttgggtttgggatttgtttttcgaatattgggtttattgtgttttataaggatttttatttcggaagttttagatttatttgggtaattagagtttttgggttgattattttttagttttggttagttttttgggttatcgtatttttttaattttttgttgtgttacggttggtttaagttgtttttattagataatgcgaggtatttttataggaggggataatttcgtttttaggagttttttttttttgtttttaggtttggtgtagtgtgtggtttttttgtcggtgttaaaggttttaaggtttttttaagaagtttgttattattattagtagttttcgttatttggtttttttgtatatgtaagttttttttatatatttcggatgtttagggttttcgttttttttttttggtcgggagtgtgggaagagggttttattttaatgtttgagagtagggttaatggttagggtaagttgtgggggttttttttcgtcggtttttttttgtagtttttattttaatatagagtatcgatattatttgggttttgggaagatttggaggttgattattttggaggtttttagcgttttatagttattttttggggaagaggttttttgagggatttgtggtttttggttgggattttagttttagagttttgtttttcggcgtcgagttttgatttgtttattgagtgttagttcggttttcggataggtagggatttgttttcggagtttagtagagttttgggaagtttttttaggagggttttcgagggtggcggttatgtttagttcgttgtacgtgtgagtttgtttgatgaggaattggttgggaaggcgcgggtttaattataggtttatgagggtttttttcgtttttatttaggaagtagcggagattttggtatatttagtatttgggtttgtgtttgtttagttgttggtggaattatgggagttttgtttcggggtttgtagagtagtagtgggaattttttttattttagttttttttagagttggttgtttaaattcgtcgtcgtttagtttttttttttttttttttattaattttgggaatcgtatattgtttattttatcgggtttcggagcgggtgtaggaagagagagtttaatatttagaggtttgggttttttgtaggcgtttgagttgttgtggtttgagttgggttttttgttggaattattatagtagatttaatgatttgtttgtaggagttgttttattttagtcgatttcggggttgcgggaaggggttgggttttggttttgttgggggtggggggttagtgtaaagggtttgaaaagtggtagaggtgatggtttatttgttttttttttggtcggtcggtttaaacgcgattggttttttttttttttttttttttttttttttttttttataaataatattaaatgcgatttgttaatgtatttatttgggtttagtagttggattatgggtagaagtattttagatttgttattttttttaagttaagggtggggaatattttttgtgagattttggtttttgagcgtttaagattgtttttggaattttaattttgggtcggttttaggggattgacgttgatggagttgttgatattgattttcggtttttgtatggtttttaggaagggggtttttcgttttttgtttcgtcgagtttggttggtagtattttttttttaggtttgtgttttcggtagggtttgttgttttcgttttgttttgtgggtgttaggttttaagtattaggtgattcggttattgaatggttattgaatagttatttttgttggtgtttttagtggaatgtgtatggacgtttttttttttttagatttttgttttttattttttagtttttgttttaggggttattataggattaggaggtacgtagacgtgggtggtatatttattgggtagatttagttttgaatttgtacgttttttttaagggggtttttagcgggcggggttgatggtgtcgtttttttttttgttattagaacggatatgaggattgtgttttgtcgatttacgttttgagtttttagacgttataggtgtttgtttaacgagtgtttgaatgaatggttagtattgtgtgatcgtagatttttaatttttatttaaatagtttgtggtttttgtgaggttatttcgagatagttttataagaatttttattttttttgtacgtttcgtataaggtttttttggggggttttttagaaaaagggttaaagagtagtattttttcggggatttgaatacgatttttttcggggtaggggattgttttggaagattttcggtatcgttttttatgcgttacgtgattaggagggttttggggtaggatggtgttttttgtgttttgtgtgttggggtcggaggaaatattgttcgtggtcggtgttatttgttagttttgaagattaatgatgggttggatagtggttttattgagtgggagggagaatcgttgttgtttgtagttggggggtcgggtgggtgggagtcgaggttagggagaatagcgtagatttggtacggagaggtttggaggaggagtagggggttttagttatttagggtgtagggacgttatacgaggagtaggtgtggtgtgcgtttttttgcgggttttttattttttggtttcgttatttgtattaggttttgtggtgagagggtatagagtggaggaaggtgtcgtggttagggtaggttatacgttgtgttaatggattgttgttatttgtcgtttttgtggttttgttgttaggattttttagtattaggtttttattattaggtatgggttttataggtattattggtttttcgaagttagggatagattttatagataatattgagtttttgtagttagggatgggtttttacggttagtattagattttagggattagtatcgggtatttatagttagggataggtttttatggttagtattaggttttagggattagtatcgggtatttatagttagggacgggtttttatggttagtattagattttagggattagtatcgggtatttatagttagggacgggtttttatggttagtattaggttttagggattagcgttgggtttttatagttaaggataagtttttacggttaatattagattttagtgattagtattagatgtttatagttagagatgggtttttatggttagtattaggttttagggattagcgttgggattttggatgattgaaggagggtacggttgattaaagttgtaggagttagtttggttattttgaggtattaagttattattgcggttttaggggatttagatttttttatttgtttttttgaattttggaattagatatatttgggtttagtttttgttttcggggttgtgtgtttgggatggttgttttatttttttgaagtttagtgagatggggacggttgtatagggttcggtatagatggtattcgatggtatagggttatttgtttgtatttatatagtttcggttttcgttttggttgcgtatcgagagttttatgtttagatttttgttgagtttttaagtttttggttatgttttaggtttttcgtgagaagtattattgtatggattatgtttcgggattttattttgggttgggaagtttgttttatttttttaagttttttttagaggcgttttatgttttattatttttattgtttgaggggttagataggggaatttagtgtgggaggtttagaggtgtcggagtagacgttaagcgagtttcgtgtttatgcgttgggttttggtagatattttgaatgagttttttttttaggaaggagattggggttttagtttaagttgtggttttaaattttgtgattaagagtggagaaaaggtaagatttttttttttagttttttagaatagtcgatagtggtggaaatatggggtttatattgaatttttttgtaatttgttgaagagaatttagtttatatttttaggggtggaggtttggtcgatttggtagtgtgttcgtttttttggttatagtttattttggatcgggtattttggtgtttttttttagtgacgtagtgaagttattatgacgtgtttagttggtgagaaagtgttttttgtaatgttttattttttttagagggtgaataagttttgtttattataaataattatttatagaatatatgaggtttaatttaattttgggttacggtagcgttttttgggtaaatttacgcgttattttagttagagtttgtgtttttataggttttttggatttattttgaaggggggttggattttttgtttgtttcgatgagagggttgtaggatagtttttagcgagtttttttgagggttgtaatttttttttttggtatttttttgttcgttaggaatgttttaagtttttagtagaagtttatttattatagtcgttttttattttgtttattattttttttgtttttatttatttagtagatttcgtgtatagtttagtgtaggatttagggtgggaaggtgtttcgggtgggttggagtaaggtttttagttagggcggggttttaaggtgggtttatagttaggattgtgatttgggaggtttttttttgttttgttttagtttcggtatcgtcgttgtttttgtgtttagtggagatttattggttttaggttttaaaattttagcgaggtttgtagatagggaggagttttattcgagggtagagtgattgtcgggtttatttgtttgttacgaattacgtggttttagatttgttatttttttttttttagagttatggttttttgtttgaaaaatggataatgatggttattatgttagggattattttgaggataaacggggatgaaattgaagaggtttagtacggaatttggatatagaagtgttaattgtgtgttattagttgcggtggttgttaaggtttaattatatggtagttacgggttgagtggcgggcgggaagtggggagtaggagtatgtaagatgggtatttttgaagtttttgatttagtgagataagtatatatttagttttaagatggagtgttttaggaaggtggagattgtaaaggttttgtggcgtaggagtgtgagttgtatttttgggttttttagaattttattagagtttagggaggaggttagtttagatataggggtaacgggagagatgggagtgagaaaatggtttggcgtttggaagtggagtttggaaaggtgggcgtggggatagaggagggttttgggggttatgggtttatgcgtttaggaggtggaggtagtgaacggggttacggtcggttttatacgtggtattattagttttgttgagtttgtatttgttttttaggttttttgagtgttattattatttggtattttttggtttgatttttgttttttgttcgtttgggaagagtgagattatttgtttaaagttttttagttgtttttaattattttggttgttttttggttttgtttagggttagtcgttgatttgaattgtttggtgttatttttttagatttttggggttttgttttggtattaatagttatttttatttttattatttattcgtatatttatttagtagtgttttttgggtatttatttagtaatattaaggcgttgagatgcggttgtggttaagattcgggttcggtttgtgaggatttcgtagttgttatttttttagagtatagttttagttaggtatattgtggggtttagaaagagaaattaatatattgtgttcgtttattttgagttgttataaggaatagtcgaggttggggggttatttgatttacggttttgtaggttgtataagtggtgttagtatttgtttggtttttggggaggttttaggaagtttttttttatggtagaaggtgaagggggagttggtacgttatatggcgagagagagaatttttagattttttttttttttgaaatggagtttcgttgtgttagttaggttggagtgtagtggtataattttcggtttattgtaattttagttttttgagtagttgggattataggcgtatgttatcgcgttcggttaatttttttgtatttttattagagatggggttttattatgttggtcgggttggttttaaatttttaattttgtgatttatttattttggttttttaaagtgttgggattataggtgtgagttattttatttagtttttttagattttatagtaattagatttttcggattttgtgatcgtggggagggtattaaattatttatgagggatttatttttatgatttaagttttattttttttaggttttatttttaatattagggattatattttagtatgagatttggaggggataacgtttaaattatattatacgtgatttttttgtgcgtgcgttagtttttatatttggttaagtagtagaagttttttttttgttttttgttgagagagcggtgggggagaaatgatttagggatgggaggttggtttttcgaggggttttggtgtttgtggagtgggagtgcgggaaggtttttacgttgtgtgtgtcgtgttgggttggttttttatagtttatcgtggtgtttttcgaggattgttggggaggaaagagttaattaatttggggatttagttgttgaagttattattaaatttgagtagtttaggggtttttttttttttgggttttatgttatttagtatagtggggtttaattgaatttttttttattttttaaggtttttggttggcgtggttggggtttgggatacggggagcgagagggtttgggttttttttagatttggagtgggtttattagaaatggtttaggaaatcgcgggggttatttttagtagttgggggtttttgtggttatttttttttggttttgttgagtagttttggtttttggagtttttagtaagggatgtgggggtttgttaggttagggtttttattgttgtcgttatgtatagttgtattttgtattcggggagtggggtgtcgagtggggtgtttgggaggtaggtttttttttgttttttttgtttagagattttggggatgagttgagtgagattttttcggtttttgattggttgtgtttttgttgttattttttattttttttaagtggaggtttatgatttttttttttatttaaaagggttatttagtgatttagtagattttagtttgtgttatttagggtttttttaaaaatttgtggggaggttgggtttggtggtttatatttttaattttagtattttgggaggttgaggcgggtggattatttgaagttaggagttcgagattagtttggttaatatggagaaattttatttttagtaaaaatataaaaaattggttgggtgtggtggtacgtgtttgtaattttagttattcgggaggttgaggtaggagaattatttaaatttaggaggcggaggttgtagtgagtcgagattatattattgtattttagtttggacgatagagtgagattttgttttaaaaaaataaaaataaataaataaaaataaaaatttatggggggatttttgtgtttattggttggtgtgaggagagggtgaggagttgtagagaaggtattaggttgaggatcgtttttatttttgggttatagaattgaaggaggggatatatgaaagatgtttttagattcgggttggaggttggggatattcgagggtaaggacgacgttgtttttgtttttgtttgtagaggagtgtatagggtttattagttttttgttgttgtttaagtgatagttttatggagatagaatttatatattgtgacgttgatttttttaaaatttatagtttaatggttttgttgtatttataaagtgattgtattagggttatttagagaaatagaattaatagaaggtgtgtacgtgtgtttagataaagagatttattattatgaggagttggtttattttattatagaggttggtaagtgttaagattggtagagtaaattagtaggttggagatacgggagagtttatgttgcggttttggtgtttatttgaaggtttaagatttaggagagttaatggcgtcgttttagtttcgagatttaggaaaagcgtatgtgttagtttgagtttgaagtaggaaaaatttgatgttttaggttgaaggcggttaagcgggaagaatttttttttatttaggttttgtgtttttttatttagatttttaggtttttgttataaaattataaagatttgattagaataaaatttgagaaaaaattttttttttttatcggttttggatttattggttgggattttggaaattagattgatagagattaataggaaataagtataataatttaagtaagttttatttgatatcgagtttttataaggaaatgaagatttagagaaatcgttagtttgagcggtttttgttttgttttgagataaagttttattttgtcgtacgtttaggttggagagtagtggttcgattacggtttattgtagttttgattttttgggtttaagttggggtttagttgtcggtttcgggagttgttttgaatttatttttaagttttagtttagatttttaagtagttgggattataggtatgtgttatttcgtttggttaattttttattttttgtagagatagggttttattatgttgttcgggttggttttaaatttttgggttcgagtaatttttttgttttggttttttaaagtgttggggttataggtgtgagttattgtgttcggtttaggtttgaatagtttttatttgttttgtttgttttttaaatttgtttgttgtttgttttgagtagtttttttgtttattttttttgtttgttttttgtttaggttggagtgtagtggtatgatttttgtttattgtaatttttgttttttgggtttaagttatttttatgttttagttttttaagtagttgcgattataggcgtgtgttattatattcggttgatttttgtatttttagtagggatggggttttattatgttggttaggttgttttttaatttttgattttaagtgatttggttattttggttttttaaagtgttgggattgtaggtgtgagttgttgtgtttagtttaggtttgagcgtttttatgttgggtttgatgaagagtggaaagtcgtgggaaattgtgatagagtaataaaagatgagttgaatagtgagttcgtgggggtttcggtaagatttgtgtattggggttttttttagattttttgtttttggagatgaggttgttttttttcgttgggtgtagggagggtattttttacgtgaggggtttatgatttattttagagaaggggtaggttagtgagttttttttggatttgttattttttaaatttttttagttgaaaatatttattatgttaaggtattgtattttggagtgtgcgttttaagttttgttgtttttaattgatcgggtgaggtttatttttattagagtatatagtttgttttatttaggtttttgattgtattttttttttgtttgtttcgagaatatttattagtagtgtttgtggttgtagcgtttattttaagataaatttgtcgggaagtattttgtttttattattatttttatattattttagtatatcgattttggaaataaaagatattattttgtttatagtattttatttttagtagtggtattttttttaaaaaaaaatggtaatttttagttgggtgtggtggtttatgtttgtaattttagtatttgggaaagttgaggtaggttgattatttgaggttaggagttggagattagtttggttaatatggtgaaattttatttttattaaaaatataaaaattagttaggcgtggtggtaggtatttgtaattttagttatttgggaggtcgaggtcggagaattgtttgaattcgggaggtagaggttgtagtgagtcgagatcgcgttattgtattttagtttggacgatagagtaagattttattttaaaaaataaataaataaataaaatttaaaaaaaaatagtaattttcgatcgttgaaaatgttaaattttagagaatatagtatttttataagtgatgttaatattgtttttgattagttgttggttgaagatttatttgatgaatttgatttttttagaatagacgatttagatgattttgttgttttgtttagaaataattgtaggaataatttaaaaaattttttttttttttaatttttttgttttttgagacggattttttttgttgtttaggttggagtgtagtggtacgatttcggtttattgtaatttttgttttttgggtttaagtgattttttagttttagttttttgagtttagttgggattataaggtgtttgttattatacgtggttaattttttgtatttttagtagagacggtgttttattaggttgattaggttagtttcgaatttttgattttaaataattggtttatgtcggttttttaaagcgttgggattataggcgtgagttattacgtttggttagtttttatatttaatttttatatagagtatttagttagatttgttttagttttaaagagcgtgtttatgtaaaattaagtgagtgttggtagtgagttgaattttttaaaaggtaaaagggttaaatattaaatttatttaaaaatatttttatagatatatttagaataatgtttgatcggttatttaggtgttttatagtttagtttagttgatatagaaatttttttttttttttttgagacggagtttcgttttgtcgtttaggttggagtgtagtggcgcgattttggtttattgtaagtttcgttttttaggtttacgttatttttttgttttagtttttcgagtagttgggattataggtgtttattattatattcggttaatttttttttttgtatttttagtagagatggggttttatcgtggttttaattttttgatttcgtgatttattcgttttagttttttaaagtgttgggattataggtatgagttattgcgttcggttgatataggaaattaattattatagttatatagttatcgttattaattttagtatattttattatttttaaaagagattttgtttttattagttaatttttatttttaatttcgggtttttagtttttagttatcgtttatttgttttcgtttttatgaatttatttgttttagatagtttgtataagtggaatcgtatagtatgtggttttggtgtttggttttttttatttggtagaatatttttaaggtttatttatattgtagtaggtgttggtgttttatttttttttatggtcgaataatattttatcgtggatagattatattgtgtatttttttatttgttgatggatatttgggttgtttttgttttttggtataattttgttgtgaagaattttgtagtgagtgttggtttataggtttttgtgtgaatatgtttttattttttttgggtaattgtaagattatgtggtttagttaattagtttttaagttatgtgtttgttgagggatttaggtttggtgggggtgtattgttgtgtttggttagttaggtgttgcgagttcgtgtcgtagttatttttttgtgttgtgttttgaggttgtttcgtcggtatcgggtattgtgagttttaggaggttaaagttttttttgttttattttgagtttaggtttcgttttatgaattaggatgaatggatattgaattaacgtagggatgggtggggttggggtggggacgtagagtgatttcgggggtttgtagttgggttttggttgttgatttttagttttttttgtttgttggagtttagaataagttagaaaggggaaatgtaaagttcgagtgttttttttgtggtagattggtaggtttgggtgggtgagttatttgtagttagttgtagcgtgagagaggaagtgggaggggagggagagggtgagtttggtgtaatttatttttggaaggaggttgggttgaggttgggggaagtgatttttatttttttgagaggatttttttttggggttaattttaaattaagggagataagatttttttgggggaggttggaagtgttggggtttttaggtgggtaggttttttagggttaacgttttggggaagttataagttattatgtttttggattgttatatatatatatatatatatatatatatatatatatatatatatatatatacgagtaaattgtaatataaatgtgtgtttatgaaagtgtttattttaaattattatatagtttgtaaagcgaaggttttggttcgtatttgggtatttattgtttagttagtcggtaggtagtttgtattgtagtttgttattattttttagagatgtagtcgaggagtttagttggtttggagggtttagtgggcgtagttttaggaaagtggttaggttcgggttaggtttttttttttttttagttttgggagaaattattatatgaatgtagttttttttcggagttcgggttggaagggtttgggaggggataggtttttattttaggagtttttaggtttcggttgttgtttgtgttagttgcgtgagcgtgagcgagttaggggttattattgggtggaaggaagaagcgggtattttttttaggaggttatcgttggagttttatagtaggttaattttaggttttgggttttcgggaggaggagaaagaagagaagtaggaggtgtggagggtaggttaggattagaaggtatatagggtcggggtagtgtgggagattttgggggtttttttatttaattagttaatattatagcgtttataagaatacgttattattgtagttttattattttgttttgattttagaaggtataattgatgattttagggaacggagaatttgaggaaggtttcgtaggagagggttagatgcgatcgagtaaatgtgagtcgtttgtaaattgtagagtgtacgtatagtatcggttagttttggggttagtgtttttttggtgtttagttcggtttttgtattttttagtgttcggttgggttttgtgggggttagggttgggtttggtatattagaggatttttattaagtttttggtagtgttttagttattaaatttagtttgttagttattaaattcgttttgtcggttttcgaattattttttcgttggggtcggttatgttacgttaggttttttatgtaggacggtagatggatagacgttgggattaagttatttttgggtcgcgagacgtttgattttttgttggtgttttagaagatgttagtttttcgtggtatgttttttacgcggtgtttggggattagtggtttttaaggggtttttttgttttagcgtggggagtggtttggttaaggttttagtgtttggttggagttaggtataggtttaggtgtattggttggaggttttttgtttatgggttttgtttgttttgtgtttttggtttttattgtgttttttgtgtttttgggagagattttaggggttttgagtttagtattggggttggggagtgggcggggaagagggtggggattagggtttttggttgtagaatagttaggttttaagtttttattttattttttttttatcgggcgttttattttatattgattattttttgaagaaaattttttgaatcggttttttatttcggttgttttaggaagtttatttattttttcgttttaatgttttgtggttttagaaggatggtggaagtcggaaattatgagttttatttataggcggttatatatcgaagtcgcggagacgtcgtgggaaaggattttggttagcgcggtcggtatagagggagcggtgttatcggggtagacgggaatcgtggttgtttttatgttggtttgggagagacgaggggtcggacgaaaggatagtagattggttatttatttatttatttatttatttatttatagcgttttattgggtgtttcggacgtgtaaggttttgtgggtagtgaatgcgatagattttagatagtaatcggagggttacgtgtgtaagaattgagggatttaggttgggcgtggtgttttaagtttgtaattttagtattttgggaggtagaggcgggcggattacgaggttaggagatcgagattattttggttaatacggtgaaatttcgtttttattaaaaatataaaaaattagtcgggcgtggtggcgggcgtttgtaattttagttatttaggaggttgaggtaggagaatggcgtgaattcgggaggtagagtttgtagtgagtttagatagtgttattgtattttagtttgggcgatagagtgagattttattttaaaaaaaataaaataaaataaaataaaataaaaattgaggaatttagtgtagatgagttatttcgggaaaataagtgggagttttaggaatagtatggggaagggatggtttcggtagggaggatttttgtgggtagttttgttggaagagttgaaaggtagttagagaggttgtgcgtggatggaagttgaagagtaggttaggggcgtgtgttttgttaataaagattttaagtatttattgattaggtataatattatgtgttttataaataaatattttatttgatttttagtatttttatgagatagatgttattattttattttatatgtaagaatattgaggtatagagtggttaagttatttgtttagggttatatagtacgtcggtggtaggtaggattttggagttataggaatttggtatattttaggtgtaatggaaattagttacggttttatagagggaaattattagattagtaaattttatatacgttttttggtgttttgaggaggagggattcggataggggtagttaatggtggtggttgtgagatgtgttgggttaatattgatgagagtttgggatggatgagtggattcggagtaatggaaatggagggtttaggttcggtttttggagatttagttgtaatagttgttggttggagaggttgtttatttagatgggggatggggtgggaggtaggtgagatgagagttttagagtttagtttggggtacggttattgggtttaagatgtttttagatgttggggtttgatagtgatagtggttgtagatatttaggatttagtagagggtttggtatagcggggtttagggatacgtttgtgagttaggttggtatttaagtgtgaatttggataaagaaggtggtattgttggtattgaatgtttaggggttgggtgaagttagttagggagaggggtttttaaggtattaggattgatttcgtgggtgagggcggaggaggagacggtagaggttgagagaatagttagagataggaggaaggttagtagagttatgtatagaagtttggagaagatttgaggaaaggaagggttgggtggtcgttattttttgtagttaggaggtaagggtgatttttgtgtgttttattttttagaggattggtggttttatttggttagaattttaagtttagagatgtatttgagttttatgttatggtgtaggtagtaggagttatggagtaggtttgcggggttacggtttgtttgttgttttttggtgtttttattttgagtttaggggttgtttggatgttttgtgttgtatttttttaggcggtgttttagagaggatgaaagtggttattttaaggtgtgattaggtagcggtttatgtatattgtttttttttggggagagtttgggatggaagggtatgtgtgtgtttttgagattttttgaataggttttatgtatttatttatttattttattatttatttatttatttatttatttatttatttacgtatttatttatttatttatttatttatttatttgttaatttatttatttatttatttatttatttatttatttatttatttatagttatttatttatttatttatttatttatttatttatttatttatttatttatttatttgtttatttatttatttatttatttatttatttatttatttatttatttatttatgtatttatttatttatttatttatttatttatttatttatttatttatttatttatttatttatttatttatttatttatttatttatttatttatttatttatttatttatttatttatttgtttatttatttatttatttatttatttatttatttatttatttatttatttaattatttatttatttatttatttatttattattcgtttatttatttatttatttatttatgtatttatttatttatttatttatttatttatttgtttatttatttatttatttatttatttatttatttatttatttatttatttatttatttatttttttatttatttatttatttatttatttatttatttatttatttatttatttattcgtttatttatttatttacgtatttatttatttatttatttatttatttatttatttatttatttatttgtttatttatttatttatttatttatttatttatttatttatttatttatttatttatttatttatttatttatttatttatttattaatttatttatttatttatttatttatttatttatttatttagttatttatttatttgtttatttattcgttaatttatttatttatttgtttgtttatttatttatttatttatttatttatttgtttatttatttatttatttatttatttatttatatatttatatatttatttatttatttaattatttatttttatttttattttagaaagtatttgaagttgttggggtgtgtatttggaaaatgcgttataagtttttataggtttttttttggtttttttatttttttgattggtttttttttcggatatgtaggattttgagtagtttttttgggaggtgggtgtagtttaggtaggttgtttgtaaagttaggatcgagggagttatatttaaggtattgtgggtttttaaggcgatggtattgtgggtttattgtttttagatttttttaatttttaggtttttgagtaggaggatttttggggtagggtttggagacgggaagagaaaataattttagttttttaatttttgttagtttaggtgggtgttgtatggattgggggtatttggaatagttggtttttttattttttttttttatttttttagtttttttggttataattagatagttgtgtgcgatgttttttttttttttgaaggggttatttagttaggtttttatttatggtttaggaatgtgtttttttttgtttgttttttatttttaagtaggtcgtgtttttagttttttgttgtttttgaagggtttgggtatggggtagtttttgtagtatttttagggttcgagttgatttgtatagtagaagggaattgggggaaagttttttttttatttagtatttggtagggggttattttgttgtattttagagatttttgtttaagttttgttattttagatgattttataagttgggggaggcggagttttagtttttatagtttttgttgttgttttattgttgagttttgttgtgtatttgttgataggtttgttgatagtagaaggggttggagagagggaagttttgggttttgttttttttaatttttgtttaggggatatttttgataagaggaaattttagtttgtgatagatggttagtgtttatttatttacgggggaatttttttttttttttgtaagtttgtagatttgttaggaattaaaggaatttttggttgataggttattgtggatatggttggagggttggtacgggttggattttggggttgttttgaggtaggggtcgtttttgttggaaggttttttggggtggggaaggtattagggttattttttgattttttttttgtagtggatttattttagagtttgagataaggtaagggggtagtagaaaatagaatataaaatagttttttttattatatatcgtattagaagttagaggatttatttttggtttgttttttttgtagtttaagttttgagagtggttttttaggaagtgaatggtgatggtttgtaggttagagtttgttttggtttaagattgatgttttaataggtcgcggagtttgggtgaaaaaatttaggttagggaggtggtgggttgtaaatgaaagaatagaggagggttttttttagaaagcggcgggtggtgtgaggagtttttggattttgtttaaatttgattttatcgattggggttaattgaaatcgtgttggtagaaaggtaaaattgtttgagatttttttttttataatagaggagaggtttgtttgaaagggtttggcgagggaaaagttggaggaattttggtcggtagtaaaagtggggattttcgttttttgtttcgggggcgtttcggtttttgaatgaatgaaagaggaggttggatggagatagatttatattatttgttttttttaggttttgtaaaggagtatatagggtttttgttggtttttttattttgttagttattaagaaggagaaaatattaataggggaattgtaaagttgtagttttgtttaagttttatagtggaaatcggaaagagttttagttcggagaaaaatgtagttttttgtttttgtaaattcgtgtttttttttgggaggttagagttattgtgttcgatttttaagtagggttttagagtgttttaggaggggaaggtagagttttagattttcggtattttaggttttaattaggttttgaggagacgttttttgttttatataaagtgtgaagtgtaatttgatttggagttagttaataaattagatgagttgtgtgtattttaaaaatttagtttttgattttttatttatatatatttgtataatttggttatttatatttagtgtttttatttttagaagagaataggaagtttttagtgatatttatggagtgtttgtagtagtttgggtaggttagtaggaatataatgtagtgaaaagtagagttgagatgggaaaatattttgtttttagagttttttagggatgatattttttatcgtttttgtttattcgttttggagtttatttcgtaaatagtaatttgtttttatttgagagtttttttttgtcggagtttagggatggagagtagttggttttagttttttttttttatttttttgttttttagatttattttttattttgaataattgtttttaatttgtttttttttttttttagttgtagaatttagaattttgtgtgtgtggttaaaagtttagagagtgttgtaggtaatgttgagataattttattaaattttgtaagtttttattatattaagtttgtttgttttttttaatttttattttattttattttattttatagggatggggtttcgttacgttgtttaggttggttttgaatttttgggtttaaacgattttttcgtttcggttttttagagtgttaagttatttttttaattgggatttacgggtttagggattttttgatgaatcgtttaaaatacgtgtgtgtttgtttgtttgtttttaatgtatatttttttagggagagtttttattttttattagaggtttgtggtatatatatgttttgtattattgtattagattgtgaattttttatatgttaaagattgttttaaatttgttcggaagtttcggttaataaatatttaaataaatgaattttaaatttttatgtgttattattgtttttattttgattatttttaagtttgtagtgttatttttttgttattgtgaagtagatatttaataaatatttgttaaatgaattaatgttatggttttggtttattaggattttaggattatcgtttattattattgtttatagtttttttattattttgttttagagtagttttttttttgaggtttgtttatttttgtacgtgtgtttagtttttagttttgtcgttttattatttttttttttttatttgtattttttgaattgttaatagttaataatagtttttttttttatttatttatttatatttgaagtgagaagttattattgaggtttttgtggattttgttagtttaatttggggcggttttttggaggtggagtttttagatgagggatggatattttggtgtttgttgggtagatttatttgggagttttggtaggggttttagggtagttttgtttttttattttggttgtgggatttttggtgtattagggttttttaagtaagtatttgtgttttgggagagttataggtaggtttgagagggtttttggaatttgggatttttagttcggtttagtagttggtattattattttttttgtaagggaagttatggaaattaagatgttaatgtgttttgataggtttggggtggttttaagttttgggaagagttttggtaattttttttggttggcgggtagaatttttttttggtagtttagggttttgtttttagttttttgggggagagtaattgagggaggagttggaggttaaggttttagtgttgagttgtttgtatcgtagttgtattttttgggttttggttgtaggaattttatatttttttagtttttttatggttttcgaagatttggtttggggagggggttagtagtttggggtttatttatttggttttaaattttggttttatcgtttattcgttttgcgatttttataattgataaaagttttttcggtttcggtttttttatttgtgaaatgggataataatagtggttattttataggattgtgtgatgatttattagttataatagtttttgagtagcgtttagagtaatatttggggttcggtgtagtggtttatgtttataattttagtattttgggaggttaaggtgggaggatcgtttgaggttaggagtttgaaattagtttgattaatattagtgagatttattttttaaaaaaaaaaattagagtaacgtttggtatagagagtttttagtaaatttcggttgttgtgatgagttttgtttttttatttgtttatttatttattagattttttgtcggggtttgtcgtgagttttacgttgttttgaagaaagtcgggttggggtgagcgtgatggatgaggtgtttggttttataaattttgtgtgggggggttgtggtgagaggaaatcgtatatattattatttagttattatcgtggggagattgtttggacgtagagagtaggttttgtgtgggagcggggagggtaagttttggttgcgaggtagggtttttttaggatttagtagggatttgaaggattttgtaggtatttagggagataggagaggaggagggagtagttttggtcggatattgtttttttagtattgtttgtattagggatttatttagttttaagaagtttttttgtgggggatagggagtatttgttagtttataggatttgaagtgtttttatgggtttaagtttttgggaaggtttgtaggtggtcgtagggttgtcgtaggggtgttggttttagggtttggatttaggggagtttgtagagggagggtagttggaggttgttttagtgtgtattgttacgaggtaaagtaaggagattgttgggtttacgttgggtcggggtggatggaggtaaggaagttttcgtcggggtaagggtattagttgtagatgtcggtagtttttttttggatacgggtttggaaggttgatagggtgtggtgagtgttatcggtttttttgtcgtggtttggttagtggttttataggttttcgtgggtaggaggaggatgattttgtattttgtttggttattattggtagtgatagataaggtgtgtggggatgtggttatttcggttcgtgttttgagagttaggtgtgggttgggtttggggaagataggggaatggtattgatttgattttgagtattttgttttggggtgtaggttcggttgttatttttttggagttgggaatggtattgggcggtggtttagggttttttgttttagcggtattatttttgtatttggttagtaaggttgatgggatttgtgtggatatttttgggacgtagattaggtagtatgatatatagggaggggtaggtagagaagggcggtttttgggttttggtttttaagttaggttttgtaagtttgttgtgttaagttttttttcggtattaggttaggtgggttagggttagttttggggttgtgatgagtgtgagtgtttttaaagtgtgttatgtttaatagttgttttttttttgggtattgttttttagttagatattttatagttttcgttttagttatagatagtaatttgatttttttattttcggtaggttttggggttggggtaagaatttgttattaagtgtagatgtttttagagggtgttggtttagggttgcgtggattatagtttttttatttttgttttagatttatttgtaattttggagaaaagatggtttagtggacgtttgcggggaggagggagttggtttttaggatgagtagatttgggggtagtttttattacgggatcggtgatttattgttattagcgttagtgaatggtagaggggttttggtataaggtttgggtttagaatgggaatttgtagagaaattgttaaggtttttcgttatttgatattttcgtttggttgttattttagaaatatttttgttgtaagaagatgggggagtttgtttggggtatggtttggcgatattaatttgagaattttaggtttaagtgttggtttttgggttttagttgttttttgagttgtaaagttggtttttgggtatttgtggaaaatattggattttttattttattttattttatattttgggatatatgtgtagaacgtgtaggtttgttatataggaatataagtgttatagtggtttgttgtatttattggattttttaatttagttttattagaaatgattgtttttttttttttttttcgttttttttttttttttttttttttttttttttttttttgttttttttttttttttttttttttttttttttttttttttttcgtttttatggggatataatttttatattatattattcgtcgatttagaaagtatagttgagtggtatttttttataattttttataagtattatttttaattttagaacgttttttttattttaaaaggaaacgttattttcggtatatagttatttttttttttttagtttttggaaattattaatttgcgttttgtttttatagatgtatttattttgaatatatgattagaattttaaaagatgtgattttttgtgtttggttttttgtagttggaatgtttttagagtttatttgtgttggcgtacgttcgtgtttttttatggttgagaaatagttcgttgtgttgatttagtacgttgggtttttttacgtatttgttggcggatgtgttagttatttttggagtcgggtgtgttgtgttatttacgggttgtattaggagttggggatattattgagtaagttatagtttcgggtatttaggagttcgtagagtaggagttgggagggaggttaggaggtgtatggtttgtttgttaggttggagagatttgtaaaaagttattttgagttagaaattagagtttgaggtttttgatttttagttgcggagtcgggagggaagttttgtattttgttttgattgtggggtgacgtgttagttattgtttaaattagaatttttttgagagtcgacgtgggtattgttgataattagtttggatattcgaaagaatggaaagtagggatttagatagatttttgtataatcgtgttcgtagtagggcgaggtttggaggtgcgatggggattttaacggggtagttgtcgttttgttggagtttacggtttttggggggggttataggtgttaatcgtatattatataagtaggagtgtgaaattttagggttgttaaatttagtgagggttttgtgttggtttggttatttatagtggtattttaggaaaaaaaattattttatggattttagtttttttattagtaaagagtaggttggattggaattttgtattatttagtatagttgttatttatgaaatgtggttatttaaatttaaataaaaatagaaatttcgttttttagttggattagtttagtgttaagtgtttagaagttatttgtgaatatattgtggtaattttttaaaaaacgaaaattagaattatcgtagtattttataattttatttttgggtgtggatttaaaagaatgtatagtattttaaagagttagagatatttgtatatttatatttatagcggttttgtttatagtagttagcgggtagaaataattcgaatgttcgcggttaaatgaatggagaaattaaaggcgggataggtcgggcgtggtggtttacgtttgtaattttagtattttgggaggtcgaggcgggtggattatttgaggttataagtttaagattagtttgattagtatggagaaatttcgtttttattaaaataaaattagtcgggtatggtggcgggtgtttgtaattttagttatttgagaggttgaggtaggagaattgtttgaatttggggaggtagaggtttcggtgagtcgagatcgcgttattgtattttagtttgggtaataagagtaaaattttgtttaaaaaaaaaaaaaaaaagggtggaatatataaggaatttgatttagtcgtaaagaggaagttaggatatttgtaatagtaagggtgaatttttcgggtattacgttaagtgaaataatttggttataaaaggataattttgtaggattttatttatattaggttcgtagagtagttagatttagaaaaatagtagaatggaggttgttagaggtttgggggatggggttggggagttgtttaatgaggatagtttgttttataagatgaaaaagttttggagatttgttatataataatgcgaatgtatttaatattattggattgtatattttaaaatagtgatcgtggtaaacgttatgataattaaaaggaaaagttacgtggttagtggttattacgttgagtagcgtaggtttcggacggtgtcgtggttatagataatggagtgggtgatttttattattgtttttagttgtttgagtattatggtgttttggggttaggatgaaagtgtttttgggtatgggggtttttgttttttttatttgggagttttgaaggtagattttaaagtttatttggttaggtaggagagcgaggcgggtttttgtattgttttttgcgtgcgtgtttgtttgcgggttagtcggggtttgtaaggtcgtttttcgagggaggggttgtaggaatggtttttatttgtgtagaaggtaagttattgttttacgttaatggtaaagatggggttcggttgcgttgtattattattttttaagcggggtttttggtgggtaggatgtttggtttgatttgagtttttgtagtgagtgttggtgtttgtggagggatttagttgtagttgagtcggtttttttttcgttttgggttttaggggcgttgggggcgagaaaggagagtttagggggtagcgtttttttttaggttttgttggggagggttgagggatgttggggggaggtgggggcgggtaggggttggttttagttttaggtaaaatggtttttagatttataggtagatggaagcgattttcggttacgtgggtggggattgaattgttgtttcgtaaggtaaggttttatgtttggttttaggaagcggttttaaagttatatggtttatggttagatgtagggttgtgtttttgtttatttaaaggttttggaagtttaggggagagtatttttgaagggggagtaggagtaggagtaaagttttgaaggtttttaggttgcgtggtttgggtgggggttacgtgggggtatagagagaggagttttggtttttaggttcgtttgtgggtattgtttttagtagtggagatgtgtggatttttttttggtattttttaataaggaattatattgtttttttgtttttttaattttataagataggaatttttgtgttttgtggaggttgagaagacggggaggtgtttgtgaggataaattagtttttagtttttggtttttagagttttttttttttttatttttgatgttttaggtttggggagttttttttcgatattttttgatcgttttagtgaaataggtcgagagggatggtttgaatcggttggggatgtaggttgtagttagggggtttagtgggtattttttgagttcggtttttgtttcgtaagtggaagggtagttgaattgaagttttttattgttttttttggtttggaagtttgttttttattttttgggtagagtgaggagtgggcgtgggtcgggagggttgttttttgtttgggagggttgtttatttgtttgttacgggggatgagttttttgtagtttttcgtgttgtggttttggtttttacgtcggttttatttttttgtggttgtttttgttgggtgtttatcggttttagggaaaagttatttttttttcggaggattggcgggaggggttttgtttgggagcgtgtcgtgtggtttttgttttagcgtaggatgtttgaggttagattttttttgggaggtaggatggggtaaaagttttttcgtaggtagagtagggtttggatgggtttaagtagggacgggggtatagaatagtagtcgtttagtttgcgtgggagttgagggttattaagggtagttttagtttgtggggattagtagaggtattatttttgtgattagcgagttgtttgtatttgtatgcgtatgtattagtgagtgtggcgagtttgaggtgtgttgggatttggttcgtgtattagttagttttgatgggaattagttttattttgggtatttttggaattttattgtgtgggagtatttgggtttttagtaggcgtttttcgggcgttcgtttttagttttaggtttttgattcgtgtgtggtgttttaatagtagttaggagtagggttatcgaagggatttatagatagaagaggttttagtgatttcgggaagtttagttttacgtgttttatatatttaagagtaaaatttggttttggtttgtgggtgtgtagttcgtgggcgttggttaggtatataagacggtcgtttgggttagtttagggggaggtagatgtggtgtaggggttttttttttttatgagtttaggaatagttttgtatttaggtattcgttttgtatttagtattttttttttttttaggattgttggttcgttttatgggattgaatatataattttatggggatcgacgttggttttattttttttttttataagattatttatggggatgtgggaggcggggatatacgttggttttattttcgttttttataagattattttttttgtgttttggttcgtggatcggtttttaaggtttttgagtggtagtaggcggtatagtttatttgagtagaggtgaaggagagggttaggtttatttgggtggttcgaggtagtgtggagggttaggagaggagagtattttttatttttgtttgagtagttttttagggtacggagataggagtttagggttagttttgttttggagcgtagggggtttttagtttggtatagtttttagaagaggagatgaaaaagtttggttttgggagtttggggatggagttttgttggggaggtagcgtggttgtaggatggtagttttttagaggatattacggttagggatatttattcgggggaatttttaggggtcgtttgggtaagtcgtttagtttttttgagttttagtgttttagtttttttatttaaggatgggtgtgataattatttggtaggcgtttgtgtgtgagtttttgtttcgttttaatttttttgttgttttttttttagttattgaggcggtttttagttgcgttggcgatatggtcgatatttttagagatgtcgggtttaagtaggcgtttgtattacggaacgagaaggtttcggtggatttcggttacgtggggattgattttattttggagtagatgcgtcggaaggttatgaagtagggtttcgagtttaatattatggtggtcggtgagtttttattttgtatgttatttaattaatgtcggaaattagttttagtttttagggcggtttataagtttttgggtttggtttttttttttgtaaaatggggtagtaattttgattttaaggacggattgttagtgatattgcgtgtgtatgtatgcgtttgggaggagtttatagtttttagcggttttttagaggggtttgttttgtatatttagggtttttgagatgattttggggagtttaggtcggtttggagtaggttttgatgagtggtcgttgtttttgagtaatgacgttagtttgtgtagagggttttgtggtagttgtttttttattgttgttttagtttggttttttaggttttttatcgtattttatcgtatttcggttagaggttttttagtagtttagttttagttttgttttggaattggggtttcgtggtttttatattttttggtggtttcggagagttggaggttattacgggaggtcgtcgattagtacgatttgggtagggtgagggggttaggttggagtttatagtgggtcgtttgttgtttttaaagttttttaggttttatttaaattttatagggattttgtgaagggggcgtttcgttttttaggtagaagcgaggtttagggaaggttgttaaggttttttagtttatagggtagagaatcgtagttatcgttttgatttttagaattgtgttttgtttattttacggggtttagggaggggtttggggaagtgttttcgttaggttatattttaaataaaggtgagtttgcggggtttttgtaaggtgtttgggtattttttaggtcgggtttgtttttttgatttttgttagtcgtgtacgttttttttgtttagttttgtggacgtaaatttatatttgttagttcgatatttttttttttttttttgtattgatttgggttttggtttttttggggttttggtgttttttttgttttttgtagttttatgggattcggttgtttatggttttgttgtgtttatagttgtttggaagttggtagtttgttttaagggagggcggaggtgtggggtttttttttacggtttttattttgttttgtttgttgtgggggacgtgtttgtattttgaggatttagggttgtttttcgggaagatggttggagagaaagagaggggagaggtttaaaggtagtggttaggttgggatttatttttgtgggttacggaggggttgttttgttttttagttagggatagggtgagaaggatttgggaatttttgcgttttagttatggtataggttttttttcggagttttggttttaaggagagggagaggtagtttagtagttttcgtttttcgtggttgttattgtgatagttttgttttttgggaatggtgcgtaggaggttattttatttgtttgggttttttcgtttttttaattttgagaagaatagtggttttgattttttataaaattatttttttttagggatgtcgagtgaggaataagacgtggggtagttttgtttttttttttttttttttttatggtagttgtgtttatttgtagaggtgtaggtaaggtggaggggtatttgtttggaggtttatagatttcggggagaattttagttttgttttaatttagcggggtgaggtttgtgtgtttttttttgggttttttttttgtgagttttagttttttcgtttataaaatgggattattttataaagtgagattaagcgagttaggtttcgggtagggtttttaataggttgtggttgttcgagaatttgtagtagtggtgatggtggttgtggtgatgaggatgatgggggtggtaatgacggtgatgatgatggggtgatggtgttagtggagatgatggggatgatggtgatggtggtggtgatagtggtgggatggtagtggtgatgtgggtgatggtgattgtgatggtggtggtggtggtgatggaggtgatggtgatagtgattatgagggtgatggggatggtggtggtggtgatggtgatagtggtgggatggtagtgatgatgtgggtgatggtgatggtggtgatggtggtggtggtgattgtggtggtggtggtgatgatggtggtgatgatggtgattgtggtgatggtgatggtggtaattgtgatggtggtggtggtgatggtggtgatgatggtgattgtggtgatggtggttatgatggtggtaattgtgatggtggtggtgatggtggtgatggggatgatgatggtgattgtgatgggggtggtggtggtgattgtgatggtggtgatgtgggtggtggtggtgattgtgatggtggtgatgtgggtggtggtggtgattgtgatggtggtggtggtggttgtgatggtggtgatgtgggtggtggtggtgattgtgatggtggtgatgtgggtggtggtggtgattgtgatggtggtggcgatggtggttgtgatggtggtgatgtgggtggtggtgattgtgatggttgtgattgtgatggtggtggtggtgatggtgatgatggtggtgattgtgatggtggtgatgggagtgatgttggtgattgtggtggtgaagggggtgatggtggtgattgtgatggtggtgaagggggtgatggtggtgattgtgatggtggtgaagggggtgatggtggtgattgtggtggtggtaatggtgatggtggtaaaggggtgatggtggtgattgtggtgatgtgggtggtggtggtgatgtgggtggtggtggtgattgtgatgggggtgatgatggtaatgtgggtgatggtgattgtggtggtggtggtgatggtgatgattgtgatggtggtgaagggggtgatggtggtgattgtgatggtggtgattgtgatggtgatgtgggtgatggtggtgttgatgggggtgatgatgttagtagtggtggtgatagtgatggggatgatggtggtgttgatggtgatagtggtgggatggtagtggtgatgtggttgatgatggtgttggtgttgatgattgtgatgatagtggtggtggtgatgagggtgacggaagtggtgatgatggcgggagtgatgggatgatggtaatagtagtgatggtattgtgatgatggtgttgatggggatggtggtgatgataagggtgatgatgatggtgatgataataataaaagtaataataataaagggatatattttgtagtattttagttggtattttttagatttaaggtgtcgtggttggaatattgatataatttttgatttgaggttggttaggatatagatttggtggatagagagagatggacgaggagtgttcgtttttgggttattaaatagtttaggttagggatttttagtattagtttttgtttttttaggagtttatattttttttagaaaggtgttattaaagttagaatattagtgtaatttagggtgttttttgtgttgtgtttttttgagatagggttttattgttgtttaggttggagtgtagtggtatggttttgatttattgtagtttttatattttgggtttaagtgattttcgtgttttaggtatgtgttattatatttggttaatttttgtgttttttggtagagatagggttttattatgttggttaagttggtttcgaatttttgattttaagtaatttattttttttagttttttaaagtgttgggattataggcgtgagttatttcgtttggtcgatttttgtttttttaaaagatagggtttttgttattttggagtggtaatgattttagtttattgtagtttcgtatttttgggtttgagtaatttttttattttagttttttgcgtagttgggattataggtgttcgttattatatttagttaatgtttatattttgatgtagagatagggtttttttgtgttgtttaggttggttttgaatttttgggtttaagtaatttttttgttttagttttttaaagtgttgggattataggtatgagttattatatttggtttagggtattttttttggtgtgttgttagcgtagtttaaggtagttttgtgtagggtaaagtaatggggtttcgagtttggaggggtgtgtgtgtgtgtgtgtgtgtgtgtgtgtgtgtgcgcgtacgcgcgcgcgtgttatatgtgatttgtttgtgtgtgttgtgagagttgtgtgtgaggtatgtgtaagaggtatgtttgaggtgagttgtgtgtgtgttgtgagttgtgtatgtgaagtgtgtgtgttgtgaggtgtgtgtatgaggtgtatgtgagttgtgtgtgttgtgttgtatatgaatgttatttttttattttcgtttgttttagttatttgtggattggttgtttgtatatacggttattgtttttcgagtggtattattttgtaggttagcgttttttagtatatggttttatagattttatgggatatgcgtgagtttgtttgatgtttatattagttttacgggggaaggattgtttattttattttgtagattaggaaattgagatacggtgaggttaggtgatttgtttaggttttggtcggttagggaggagtagtttgaatatttgggttttggttgtaattattttggtgaattgtaggaatttcggttatttggtgtattttgggtagttttgggttttttcgttagttcggtttttgttttgtttaaaatttgagttattaggagattttttgtttagaaagtataaggggtataagagatgtcgatttttttaggttcggtttattttttaggagaggattgtggtttgggttgtgttggtattagagttcggttgtgtgggtttatatagttattggatattcggttcgagggtgaagttttcgggggttgtttggtagggatattgtcgggaggtagtttaggtattgttgaattttagattggagagtttcgtgtttgggtgggaggggttttatgtgtagattttgttggttttttcggagagatttttgatcggttttttattttttttttagggtagagcggtttgggtaaatttattttaattaatattttttttaaatttaaaattagtcggaagtcggtgtagtttattttagaggagcgtatttttaagattatcgagattaagtttattacgtacggttagtggtcgggagtgggttgggggtgtaggacgtttttgtttttttggagtataggggttgggggttaagattattatatatagttagtggttaggggcgggttgggggtgtaggatttttttgtttttttggagtatagagtggggggttaagattattatatatagttagtggtcgggagtgggttggggatgtaggacgtttttgtttttttggagtataggggttgggggttaagattattatatacggttagtggttggggatgggttggggatgtgggatatttatgtttttttggagtattggtgcggtgtgagggtgttcgagttaggtaattttaggtttttaagacggggattcgttgtgtttattatttttagtatgttgagtatgttggggttttggttgtgatgggttagtgtttcggatttttgtgggtttcgttatattgagttttttatagataattgagttttttattaaaagtttgataggtaaggggtttttaggggaatcgttatcggtttgtgtcggagttggttgaggaaggttattaatttttcggtgtttttttggttgttatcgttgtttatttggggttgtttcggggttagttaggtgtggggtgtttgtgagggtttttcgttttttttttgattttgcgttcgtggttttgtgtagatattgaggagaaaggcgttcggatgaagttgatagtgattgatatattagggttcggggattatattaataacgagaattggtgaggtttttttagggggaggagtattagcgggggttttagggttttttggattttatttagagttagttttagaggtttttcggttcgcgggggtgtagggtttattttttgggatttgatatgttgttaaagtcgtacgttttaggggtttgaaaattttggattaaagtagaattatttggggaattttgttgtttttaatttattatttgaggttagttcggggaggttggtttgggaggtcgagggtaaggttgtggtattttcgtttagtaagttagattttttagggtatgtattttattggaaggtggggtgttgggttttgagttttgggaatgtacgatttgtttggggagggtattttatgtgtttgttgattcgtttttattttttacgtagttggtagtttattatgaagtttattaatgattagtacgagaaatatttgtaggaggaggttaatattaatcgtaagaagcgtatttcggatattcgcgtttattgttgtttttattttattttcgttatcggttattcgtacgtttttgtagtgtcggcgtttttatgtcgggtgttttgggttttttttgttttttgggattgtaagacggtgttgtttgttttgttgttgggtgtagaggggttgagttaggggttatggtcgttagttatgaagttgggggtgtgttatgtttgtatttttaaagttttatattgatttttatgtaagtgttttgtttagtttttattttttagttgcgttttggggagttgagggttaggtaggttttgggttgttttggagtttggtggtttgtgttttgtttttttaggttaggttttggtaggtggagtgggagtttttagttaagtattcgtagcggtgattgatttttttattcgggttttgttttatgggattttttagagggtttggtgcgtttttagacgggaagtatagagattagtgttggttttttttagggttggacggggttgttgttggtgttggtgagagtttttttttttcgtcggttttgttcgtatttgacgtcgtttttagagattagtaagggcgggaggttgtatgtattttggtaggtggattttttatggttttacggattttttgtttttagttttttgtgtattttttgttagatatttgtggtttattttgagttagggttgggaggaggaggattagaggttagtaggagtggttggtggaggtagtcgtgggtggtttgtttgtatgggtgggtggagaaggtttttcgtatttgttgttttagatgtatttttttgggcggaggaagtttaggggtttggggaaattatattttgtgggtattaggtgtaggaaggagtttggttggtgggtagcgggttttatttagagtttgtgggaaaatttaagtcggagttttcgagtttattttttggtattattttttgtgggttagtaggagttaggggtagggggttagttcgttgtttatgggttttttttgaattgaatatttgtttttttaggtagaacggtttatttgcggttttgtggtagttgttttagttgttttaagttttgttttagttgaggttgatggtaggaggtagaagttttttttgatgttagttgggtaagtcgagggcgggcgggcggtttgtggtatttttgttattttttagtattgattttttggttgggattttagttaggtatgttgtttggtttcgtttaaggcgtttagttttatggggtaggggcgggttttggttatttttgtttaaatttttgttcggagcgggtttttttttagttatgtgtgtgatcgatttatttttattgtgggaaaagttcggttttagaattggggaagatggtgttttagttttagggttttgttagtttttgttatttatagttttttttatattagattttaggtttattggggttaagtaggtaaggggagtagttcgtttggtgtaggggagtagttcgtttggtgtaggggtatcgtatattggtgttagtttttattttttttgtttttttttttttagttaaagttttatagtaagacggttgttgagttaacgatagtttttttgtgtggatatgtaggggtgtggttgggattttagaatttatggacgagggtgtttggagttggttttggttcgtttggtttgtgtagtggtgttatttgtgtttgggatatattcgtgttttttttttgttttatatttatagcgtggtcgattcggttcggggttttgtttttgttagtagggattttcgtgagtttcgagttagtatttgagagtgtcgatatttgtttgggggtgggtgtttttttattgtttcgtttttttagatgagttttacgtatatttttttgttttagttttaggtttttggatatcgagtttatgaaacgtttgagtaaggtggttaatatcgtttttgttatcgttaaggcggatatatttattttggaggagagggtttattttaaatagcgggtagggttttatttttatttgttttagtttttttgtgtaatttggagacgttgtaggtttggtaggggttatttcgtttaaaggagttatattgttagggagatcgaatcgttggttattttttttagcgggtggttggtttggtggtttttggtttaggtggttgttgggggtcgtttttgagatggtttttttagtttttttatattttaaaagtagttttgtgggagtgttaattttttagtagagtttttgaggggggttttggagaagatttggattaggtagatggtgaattttttttttagggagtgaggtcgagtaggggtcgtgcgatatggtttattttgttttatgttttttttttttttttttgagaaagggtttggtttagttgttaaggttgtaatgtagtggtataattatggtttattgtagtttttattttttaggtttagttttcgagtagttggaattatagacgtatattattatgtttggttaatttttgtatttttagtagagacgaggttttgttatgttgtttaggttggtttttaatttttgggtttaagggatttttttgttttagttttttaaagtgttggggttataggtatgagttattttatttcgttttgtttggtttttattagatggaagagaagttgggttaggtgtggtggtttacgtttgtaattttagtattttgggaggtcgaggcgggtagattatttgaggttaggagtttgaggttaatatgatgaaattttatttttattaaaaatataaaaatattagtcgggtatggtggcgggcgtttgtagttttagttatttgggaggttgaggtaggagaattttttgaattcgggaggcggaggttttagtgagtcgagattgagttattgtattttagtttgggtgatagagcgagattttattttaaaaaaaaaaaaaaaaaaaaaagttttaggagggatggtttttgttattttttttttcgttatcgtttgaggtttttgttgtgggatagggaggggtatttaagtaagagggtagttttgggtttttttttttgatagggtagtatattagagttatatggggtgttttttaaaatgaaatcgaggtgtttgggttgcggtattatatttgtttcggtgggtgtgggtggggtttgtaatttatttcgttttggggttaggtgttagggatttttttagtatgtgtaggggaagatagtttatataaagtgggtgtgtttgtcggaggttatatacgggttgtggtttgtgtttgggtaggcgagtagtcgtttattgggatgtttttgttgtacgtatttatgtcgggttgttggtagggagttgagaggttattgtaggcggggtttttgttggaattggggattgtgacgagggttttttaggaagggttttaggaggggaggtttcggtaattttgagtatttttttggggttgtgatgagtaggagaagagaggtgggaggtgtttaggacgatgattttaagtttttggggagttgtagcgtcgtttaggatagtaggtgtatttgtagttgttttttttttttttaggaggtataggagttggaggtgattggtgttatagttttttagagtttgtttttgaattcgagtttggggtagtatatagtgtggaggttatgtggtaaatattagtgggtgggtagagtttgttatagggatgggtttatttttttttttttttattttagattatcgtagatttgttgtttaacggtatcgacgtgtatttttagaaggaatttgatgaggattcggaggatcggttggtgaacgagaagtttcgggtgagtggatttattaggatgttgtttttaggggatttttagtttttgttgaagggtgggttgggggtttggaggattttaagttatgaaattatatttttggggttagagggtattgagtttaggtgtttgtatttagtgttgttaggttgaggttttcgtttttgggggattttaggtttagggtagtttttttcgggggtttaggggagggaattgttttttcgtatatgtgtaattaatatcgtttgttcgttttttaggagatgattttatttgttgtggtgggtagtgattacgagtattaggttaacggtaagaggatttttgggaggaagattaagtggggtattatcgaaggtattcgtcgtaggcgtcggggttttagatagatgggaagatagttttttttgttgatttagagtttgtgggttacgtttgagttagggattcgtggaattttatttattgttttgttttatttagagggaggggtttttttgtttttatttaatttttgggaaagtgagagggtaagtggtttgtgtagatgtttttattttagattttttttcgggtagggaaagatttagggagataggagttgggatgggggtcgttaagttttggattttggtgtaggtttttttataggtatttgtgtggttttggataaatcgtttaatttttttgggtttagaaaaggggtgggttgtagttttgtgagttagatggattttcggttttttattttgttgaagtttttgggatttttatattttagttttttgagtggttgttgtaattaattagtataaacgaggggatttaaaataatataaacgtatttttatagttttagaggttagaggttcgaaattaggggttgtttttttttgaggttttgaggattagttttatttatgtttttttttttttggtggcgtttggtatttttagttgtattgtaaaggtattatatgttttaatttttgttttattgttatagggtttttttttttgtgtttttgtttcgttttttttttttttttttttttttttttttttttgtttgagacggagtttcgttttgttatttaggttggagtgtagtgttgtaattttagtttattgtaatttttgttttttgggtttaagtaatttttttgttttagtttttcgagtatttgggattatagttacgtattatttatttgatttaatttttgtatttttagtagagataggatttcgttatgttggttaggttggttttaaatttttgattttaggtgatttgtttattttgtttggttttttaaagtgttgggattataggaatgagttatcgagtttgtttttttttttttttgtttttggataaggatgtttgtttttggatttagggtttattttaagtggatgattttatttggagatttttaatgaatttataaagaaagacgttttttaagtaaggttataattatgggttttaaggtttggattttgattatgtttttgaatggatgggagtttttggggggttatagtttaatttatttttggcggtgatatttcgggagggatgggttcgaacgttttttttttttttttttttttgtttttttattttttattagaatggaagaggggaaggtgtagagggaaatgtagtaggaaaagttattttgttttgggagagtatttggttgaaaggtttagtagagtaggaagtataagttttttaattttttagggttttagtttttattatttataaagtgggtgtagtgtgttaagattttagtgagttgagagattgttttaaagattatagagttttttgggaagttgttgttttaaaaaaatggttataatgataattattaggaggtattagatatttttgtgttattggttagatatgggttatttcgttttatgttcgaagtttttcgtatttattttttttgtagagttgaagaggtgttgtgagtagaaaatttgttaagggatttagaacgggaggcggttttagaatttatagttttagttttgtattagattttttcgagatgggagtttatgtttggaggagggtgtggagaggtatacgggttttttttttgtttgtattttttttttattattatttttgtcgggtttattttgcgggagttgtttagttgggtgtagtttgggtgttttttagtattcgtttgtggtgttaggttggtttgtttttttttggtttttttgtttgtagtttttttttttttttttgtttaaagagtttttgttgtttaggaaattttttatgaaaggtaggtttgggagagttagggatggatgggtttgggacgggtcggcggttttgttatgggcgtgtttttgttgtattttggtggttaattttgagtatcgtaggtggtcggtgatagaaattgttaggaaatgtataagagagaggttttcgtatttttttgatttgtgcgttgttgagtattattggttttagttgaggaagagtttggaatttgttaggatagttgtgaggtggtggggtttattttttagtagttttatatgaggattttggaaatgtgtttttagtattgttgggtttttatattaggggttttatgagtttatagttgatttgatattcggattagtaagggttgtgttttgtttttgttttttatttggtgaatagtattttgaggtattttttttatttttagaaattattttaagtattgttaatagaaatgtggggtgtaattgattacgttatgaatttatttaatttttatgtttttgagaggcgggtgacgttattatttatattttatggatgaggaaattgagggaatgagagtaatttgttcgagttagggagtggcgattatatattttaattttagtttgagagttttattttttttgtcggttttcgttgttcgttagtgttagatgagagtgttgttggttagtttgtaggaggttttagtgtggatatcgttttatatagggtcgtggtaggagggtttaggtaaaggtaatcggtatagtattgagagtatttgagggttgggtaaggtggaggtttcggttttgtttgttggtttattaagtaaaaattagatatttttaatttggggaaaagttatgtggttttgcgatggggtagtttggagttaggtgtatgggttttgtatttcgttttagttttatgtattgtggagttgagatagatatagtttttgcgttttttatgttttattttttttttttttttttttttttttttttttttttttttttgagacgaagttttatttttttgtttaggttggagtgtcgtggcgtgattttggtttattataatttttattttttgggttttagtgatttttttgttttagttttttgagtagttgggattataggcgtttggtattaggtttggttaatttttgtatttttaatagagacgagattttattatgttggttaggttggtttcgaatttttgatttcgtgatttatttattttagttttttaaagtgttgggattgtagacgtgagtcgtggtgtttagcgtttacgttttattttcgtaagataatggggataataaaggaattataagagatatttgtaggtgtgtgaagacgaagtttattatatgggagggtatcgggtgtttttatttgttttttttgttcggttttttatttttagtgatgtcgtttattgttttttttgttaaaaggttttttgttatataatagttatatatgttaggtatcgcgtgtttatataggagttacgaagtatagtaataaaatgattattttgagatggttattagttcgagttcgagggtatttgtgggtgttcgtggttttttgtttagtttttttgagaagtggttattgtttcgagtttgggtttgtatgtattgtgtgaagtgtatatgtttttgagtaatgtttagtattgttgatttttgagtttgtgaatggtcgtttatagtacgtagtttttgtgtgtgtttttgtgtgtgtgtgttttgagcgtatataaggtggatggggtcgtgggggtaatattttgtgggttataggttttttttaaaattttagtttcgatttttgttttattttatttttagtagtttagttttttgtttgtttttaggtttttgttgggacgttttgttttttttggttattttagtggtgcgggggtttattgttttggtttttttattgtggtttttttttatgtttttatttggtttggttattgtgttattttttattagttaggaattttttggagagtaggagttgagttgtttaggagtaggagttggtgttggttattttagtattttttagattgagggtagtgttaggtgttttatatttagttgtagagtaggtggtttttttgtttttttgtttatggggttgtttttagattttgtttttggtattagtatttttgggtagggggagagaggtggggttcgggtagagtttttttattgggatattaaagttttttttgtttttttttttagttgaaaatattatatattgtgagtttgtttatttgcgggatttttttattaggtgagagatagggtgtttgggtggggttgacggttttatttttaagagggttttatagcgggtgggggtagtgggtgtggggtcgaagttttgggtagagtgggtgttttttgttatttgtttgttttgttttcgggaagattttggaagtttattttttgaaaaagaaaatttattgggaaatgaagtaggtagtgaagattttttttaatttttgcgaagttggttggatgggaaggttgagttttgatttattgtggtttggttcgttagagttgttcggtggttattaagggtttagtgaggttttatgtgtaggttttgtcggtagcgtggggcgtttttagtttcgattttattggtttttgatttttattttttttatttggttgaggtttttttttgttttttttgagtttaggtaaggaggggaagttttgatggagagggtgttgggtgggtggtttttggagtgtgggttttggtttgggtaggtttttttttagtaagtagttggtatggatgatgggaatgttattaagaggaggggtttttaggttggcgggggtaggggtggggggatttcgggagtcgttttgttattgtggggatattgggttttttaatttttttttagattattttttttgagttgtagaggaatgaaaattcgagtttaggattttttttttttggggataagggtaatttagttttttgttttaggttatttgtttgttataggttatagttttggaggtcggtggttatttattgtttttattttgttagtattttggatatcggtttggagtaataatgttttagttttgtttttttgagtttatgtattgtttttgggttttggatttagggttatagggtggatttagagggagatatatgtattggaatatgtgtgttttgatcgagtttgggtttattagggggattgattttttttttaaaacgtgtattagatttggtttaatatggtgggtttgggggattttatggggagttaagtagtcgggatggggagtgggggtgggggtaggcgggtttgagttcgaggtaggtcgagtagggtttttgtttcgttgtttttatttcgttgcgtttattttattgattcgttcgttttttatttttataggacgtatatgtagaatattaaggatattattagtagtatttatttcgaggcgtatcgtgtgaagcgttttaacgagggtagtagcgttatggttaacggtatggaggagaaggagttagaagtttcggagatgtagacgttattttgtttattttcgggattttgtttttaagttattttcgtttttttttaggtttttttattattttattttattttatatgattttttttatttgttatcgttttttattttttcgatatgttgttaggaaataagggaaggggttttttttcgagtgagttagtgatgaggtcgcggttttttcgaggttgtggggaggttgtattggagttataggtaggggtgagagtatttattgaattgatatgattttttgtttttaggtttggtttttcgagggtttagaagagtagtttcggtgtgtagattattcgtttgtgtggggtttttagtgtcggaggttttggggtgggggttaggtttcgtatttgtagaggagtttagtgggttgtacgtttttttttatttttatcggttttgttttttggagtgtgttagagtttaggggagaatgtagtttattaggagtatttggattttttgttcgttatatggtgtggttattatttagtttttatttttgttttgtttttaagggtagaaaattttagggttttttgttatcgattgtttagttattttaagttttttggtagttgttttttttggagtagaaagtgtttttattttagttattcgtagattgtttggttagatgcggggataggttggaatgagggaggcgtttttatttttttgttattttttttttacgttattttcgtttttatcgggttgtaggtgttgttgatgcgttgggatttgattgaggataaaaaggaaggagagatgatttttatttttttattttttagttttgaaaaggtttaagtaagtgagtttggtggaggagttgagggagggagttatggaaggtgttagaaggaaggttggcgggggtacgtgtgggtcgtggtttgggttggttagagtggcgtgagttgttcggcgtttgttttgtttaagtgattagggaagtgtgtgtgtgtttatgtgtatgcgtgttcgtttgtttgtttagtgtttgggtttggtttaagattgggttgtagttatattaatgtttagttagttatttttgttatttattttttttggtttaggttttgttgattttttgagttggggaggtgggaggttaggcgagtttgattttgttgatttattcgtgtttgggtttttttttttagagtttatggtaacgaatttttagaaaggagagaacgggcgttaggggtgtatagtttatagttgaagagtaaggtttcgtggtagtacggttcggttttttattttttgtttttacgaggggatttatgggggttgtttttgtagggtatagatgattaaagtttttttttgttttttgttatttgttttgtttttggggagaaagaggggtttgatgagattttatttaggtgtatatattattaggtgtatttgtaggtatcgggttggttgtttgtagttaggagaaggttagcgagaaggagtgtatgagtgtgagtgtgtgtgtatggaagttggggtattgggcgtttgattttttttttatttaagagaggaaggattttttattatttttattggtgagatagtttattttgttaatttgttatgtttttgttaaaattaagattttgaaggaaatgagtggttagcgttagggtttaggttatgtggtttgtttagttttaatgttatttggtggcggggtggggtgggggtgggtagtagtattttagttttgagatgttttattttttttttttgtaattagattttgaaaaattgttcgttttattaggttttgttttttaatggttttttgttacgtgtttttcgagaaatttgtttttttgtataaatgataaagtgttgaaaatgtattttttgaaataaatgttttaaatgtagaaattta

SEQ ID NO: 38 - DNA, 219909 bp, Artificial Sequence
  chemically treated genomic DNA (Homo sapiens)
tgggtttttgtatttgaaatatttattttaggaaatatatttttaatattttgttatttatataaaaagataaatttttcgggaggtacgtagtaaaaggttattgaggaatagagtttgatgaaacgaataattttttaaagtttggttatagagaaggaaagtgaagtattttaaggttgggatgttgttgtttatttttattttatttcgttattaagtgatattgaggttgggtaggttatatggtttgggttttggcgttggttatttattttttttaaaattttggttttggtaaaaatatggtaagttggtaaagtaaattgttttattagtgggggtggtgaggggtttttttttttttgggtggggagggagttagacgtttagtgttttaatttttatgtatatatatttatatttatatattttttttcgttgatttttttttggttgtaagtagttagttcggtgtttgtagatgtatttggtgatgtgtgtatttgagtggagttttattaggtttttttttttttttaggagtaagataggtaataggaagtaggaagggattttggttatttgtgttttgtaaagatagtttttatgggttttttcgtggggatagagggtgaggggtcgggtcgtgttgttacgaaattttgttttttagttgtggattgtgtatttttgacgttcgtttttttttttttaggggttcgttattatgggttttgaggggaggggtttaggtacgggtagattaatagagttaggttcgtttggttttttatttttttagtttagagagttagtaaggtttgggttaggaagggtgagtggtaggggtggttggttgggtattaatgtaattatagtttagttttgggttaaatttagatattagatagatagacggatacgtatatatatggatatatatatatttttttggttatttgggtagggtaggcgtcgggtagtttacgttattttgattagtttaagttacggtttatacgtgttttcgttaattttttttttggtattttttatggtttttttttttagtttttttattagatttatttgtttagatttttttaaaattgggggatgagggggtaggggttattttttttttttttttatttttaattagattttagcgtattagtagtatttgtagttcggtgggggcgggggtggcgtgagagggggatggtagggagatgaagacgttttttttattttagtttgttttcgtatttggttaagtagtttgcggatggttgagataaaggtattttttgttttaggaggggtagttgttagggggtttggagtggttgggtagtcggtggtaggggattttggagttttttatttttaggagtagggtaggggtaggggttgagtgatggttatattatgtggcgggtagggggtttaggtgtttttggtgggttgtatttttttttgggttttgatatattttaggggatagggtcgatggggatggaggggagcgtgtagtttattgggtttttttgtaagtgcgaggtttggtttttattttaaggttttcggtattgagaattttatatagacggatgatttgtatatcgaagttgtttttttgagttttcggggagttaggtttggggatagagggttatgttaatttagtgggtgtttttatttttgtttgtggttttagtgtagtttttttataatttcggggaggtcgcggttttattattgatttattcggagggaggtttttttttttgttttttggtagtatgtcgaaggggtggggaacgatgataaatggagaaaattatataaaataaaatggggtggtgggagggtttggggggggacggaaatgatttgggggtaggatttcgggggtgggtagggtggcgtttatattttcggggtttttggtttttttttttttatgtcgttggttatggcgttgttgttttcgttgaggcgttttatacggtacgtttcgaagtggatgttgttggtgatgtttttgatgttttgtatgtgcgttttgtgggggtggggggcgggcgggttagtgaggtgggcgtagcggggtgggggtagcggggtaggggttttgttcggtttgtttcggatttaggttcgtttgtttttatttttattttttatttcgattgtttggttttttatggggttttttaggtttattatgttggattagatttggtatacgttttgggggaagggttagtttttttggtaagtttagattcggttagaatatatatattttagtgtatgtgtttttttttgggtttattttatggttttgggtttagggtttagggatagtgtatagatttagagggatagggttggagtattgttgttttaggtcggtgtttagggtgttggtagggtggaagtagtgggtgattatcggtttttaggattatggtttgtggtaggtaggtggtttggggtaaagggttgggttgtttttgtttttaggaaaaaaaagttttgggttcggatttttatttttttgtagtttaggaggaataatttggagggaggttggaaagtttagtatttttataatggtagaacggttttcggaatttttttatttttgttttcgttaatttggaggtttttttttttgataatatttttattatttatgttagttgtttgttgaggaagaatttgtttaggttagggtttatattttagggattatttatttagtattttttttattagggttttttttttttgtttggatttaagggaaataaggagaagttttagttaggtgaaaggggtaggggttagaggttagtgggatcggagttggagacgttttacgttgtcggtagggtttgtatatgaggttttattgggtttttagtggttatcgggtagttttaacgggttagattatagtggattaaagtttagtttttttatttagttaatttcgtaggggttgaaaaggatttttattgtttgttttattttttagtgggtttttttttttagaagatgggtttttaagattttttcgagggtagggtaggtaggtggtagggggtatttattttgtttagggtttcggttttatatttattgtttttattcgttgtagggtttttttaggggtgaagtcgttagttttatttaagtattttgttttttatttgatgagaaggtttcgtaggtaggtaaatttatagtgtgtggtgtttttaattaggagaggagataggaggggttttaatgttttagtggagaaattttgttcggattttatttttttttttttgtttagaaatgttggtgttaaaagtagagtttgagggtagttttatgggtaggagggtaggggaattatttgttttgtagttgagtataggatatttggtattgtttttagtttgggggatattggagtgattagtattagtttttgtttttggatagtttagtttttgttttttagaaagtttttggttaatgggagatggtatagtgattaggttaaataggagtatggaaggaagttatagtggagaagttagggtagtgggttttcgtattattggggtgattagggagagtaggacgttttagtaggggtttgaagataggtagggggttgggttgttgggaatgggatgaagtaggaatcggagttgggattttaaagaaaatttgtggtttatagggtgttatttttacggttttatttattttgtgtgcgtttagagtatatatatatagggatatatataggggttacgtattgtggacgattatttataagtttaagaattagtaatgttaaatattgtttagggatatgtgtattttatataatatatataagtttaagttcgggatagtggttattttttagggagattgggtaggagattacgggtatttataagtgttttcgggttcgagttggtggttattttagagtggttattttattgttgtgtttcgtaatttttatatgaatacgcggtgtttggtatgtgtaattgttatataatagaaggttttttaataaggagggtagtgaacggtattattggaggtggggagtcgggtagggaaggtaaataaagatattcggtgtttttttatgtgatgaatttcgtttttatatatttgtaagtgttttttgtgatttttttgttatttttattattttacgaaaatggggcgtagacgttgggtattacggtttacgtttgtaattttagtattttgggaggttgaggtgggtggattacgaggttaggagttcgagattagtttggttaatatgatgaaatttcgtttttgttaaaaatataaaaattagttaggtttggtattaggcgtttgtaattttagttatttaggaggttgaggtaggagaattattggaatttaggaggtggaggttgtggtgagttaagattacgttacggtattttagtttgggtaaaagagtgaaatttcgttttaaaaaaaaaaaaaaagaaaaagaaaaagaaaagaaaagaaaatgaggtatagagaacgtaagaattgtgtttgttttagttttatagtgtataaggttggagcgggatgtagaatttatatatttggttttaggttgttttatcgtagagttatatggtttttttttaagttaaaaatgtttagtttttatttggtaggttagtaggtagggtcggggtttttattttgtttagtttttaagtgtttttagtgttatgtcggttgtttttgtttaggtttttttgttacggttttgtgtagggcggtgtttatattagaattttttgtagattgattagtagtatttttatttaatattgacgggtagcgagagtcggtaggaagaatggggtttttaggttggagttggagtgtgtgatcgttattttttggttcgggtaagttatttttatttttttagtttttttatttataaaatgtggataataacgttattcgttttttagggatatgaggattaaatgagtttatggcgtgattaattatattttatatttttattgataatatttggggtggtttttaaggatgggaaagatattttaagatgttgtttattaagtgggaggtaagaataaggtatagtttttattagttcgggtgttaggttagttatgaatttatggggtttttgatataaaaatttagtagtgttgaaggtatatttttagggtttttatataagattgttggaaagtgggttttattattttataattgttttgataggttttagatttttttttagttggagttagtggtgtttaataacgtataggttagagaggtgcggggattttttttttgtgtattttttgatagtttttgttatcggttatttgcggtatttaaggttggttattagggtgtagtagaggtacgtttatagtaaagtcgtcggttcgttttaggtttatttatttttaatttttttaaatttgttttttataaaaagttttttaaatagtaagaattttttgggtagagaggaagagaggaattgtaggtagaggggttaaggggaggtaagttagtttgatattataggcggatattggaaaatatttaggttgtatttagttgggtagttttcgtagggtgggttcggtaggggtggtggtaggggaggagtgtagataggggaaaggttcgtgtgtttttttatatttttttttaggtatgaatttttatttcgagggagtttggtgtagggttggagttgtagattttagagtcgtttttcgttttgggttttttggtaggttttttgtttatagtatttttttaattttgtaaggagggtgggtgcggggagtttcggatatgaaacgagataatttatgtttagttagtggtataggagtgtttgatgttttttggtaattgttattatgattatttttttagagtaatagttttttaaaaagttttgtggtttttgggatagttttttaatttattaaaattttggtatattgtatttattttgtggatgatgaaaattgaggttttggaagattaagagatttgtgttttttgttttattgggttttttagttaagtgtttttttagaataaagtggttttttttgttgtatttttttttgtattttttttttttttattttaatgagaaatgaagggatagagagaggaaggggaaggaaacgttcgggtttatttttttcggggtgttatcgttaggagtgggttgaattgtggttttttaggggtttttatttatttaaagatatggttaaggtttaggttttggaatttatgattgtgattttatttggaaaacgtttttttttatagatttattaaggatttttaaatgggattatttatttagggtaggttttaagtttaaagataggtatttttgtttaaagataagaaggaaagagggtaggttcggtggtttatttttgtaattttagtattttgggaggttaagtaaggtgggtagattatttgaggttaggagtttaagattagtttggttaatatggcgaaattttgtttttattaaaaatataaaaattaagttaggtgggtggtacgtgattgtaattttagatattcgggaggttgaggtaggagaattatttgaatttaggaggtagaggttgtagtgagttgagattgtaatattgtattttagtttgggtgatagaacgagatttcgttttaaataaaaaaaaaaaaaaaaaaaaaggaagaggagggacgggatagagatatagggaagaaggttttgtgataatggggtagagattagagtatgtgatgtttttataatataattaggaatgttaggcgttattagaaggaggaaggtatggatgaggttggtttttagggttttagaaggaaatagtttttgatttcggatttttggtttttggaattgtgaaaatacgtttgtgttgttttaagttttttcgtttgtgttaattggttataatagttatttaagagattaaggtgtgagggttttaggaattttagtagggtaaggggtcgagggtttatttggtttatagagttatagtttattttttttttaggtttagagaggttgggcgatttgtttagggttatataggtgtttatgaaagagtttgtattaggatttagaatttggcggtttttattttagtttttgtttttttgaatttttttttgttcggggggaggtttggggtggaggtatttgtataggttatttgtttttttatttttttaagggttgaatggggataaggagatttttttttttgggtggggtaaggtagtggatgaggttttacgagtttttggtttaggcgtggtttataggttttgggttagtagaagagattgtttttttatttgtttggagtttcggcgtttgcggcgagtattttcgatggtattttatttggttttttttttaaggatttttttgtcgttgatttggtattcgtggttattgtttattatagtaaatgggattattttttggggaacgggtagacggtattggttatatatgtgcgggaaggtaatttttttttttgggttttcgggaggagttgttttgagtttggggttttttaaaaacgagagttttagtttgatagtattgggtatagatatttgggtttagtgttttttggttttaagaatataattttatggtttaaggttttttaaatttttaatttattttttagtaggaattgggggttttttgggaataatattttagtggatttatttattcggaatttttcgtttattagtcggtttttcgagtttttattaaattttttttgggggtatacgtcgatgtcgttggatagtaggtttgcggtgatttgggataaggagggagagagatgggtttatttttgtggtaagttttatttatttattggtgtttgttatatgatttttatattgtgtgttgttttaggttcgggtttaagggtaggttttggggggttgtgatattaattatttttaatttttgtgttttttggagggaagaggggtagttgtaggtgtatttgttgttttgagcgacgttgtaattttttaggggtttaaggttatcgttttgagtattttttatttttttttttttgtttattatagttttaagaaagtatttagggttatcgagatttttttttttgaaattttttttaaaaaattttcgttatagtttttagttttagtaggggtttcgtttgtagtaattttttagttttttgttagtagttcgatatgggtacgtgtaatagaaatattttagtgagcggttgttcgtttgtttaggtatagattatagttcgtgtgtagttttcggtagatatatttattttgtgtggattgtttttttttgtatatgttgggaaggtttttgatatttggttttaggacggagtaggttataggttttatttatatttatcgaggtagatgtggtgtcgtagtttaggtatttcggttttattttgaaaggtattttatgtggttttgatgtgttgttttgttaggaggaagagtttagggttgtttttttgtttggatgtttttttttattttatagtaggggttttagacggtggcggagaagaaggtggtagagattattttttttgaaatttttttttttttttttttttttgagatggagtttcgttttgttatttaggttggagtgtagtggtttaatttcggtttattgaagttttcgtttttcgggtttaagagatttttttgttttagttttttaagtagttgggattataggcgttcgttattatgttcgattaatatttttgtatttttagtagagatggggttttattatgttggttttaaatttttgattttaagtgatttgttcgtttcggttttttaaagtgttgggattataggcgtgagttattatatttggtttagttttttttttatttaataaaaattaggtagggcgaggtgaggtggtttatgtttgtaattttagtattttgggaggttgaggtaggaggattttttgagtttaagggttagagattagtttgggtaatatggtaaaatttcgtttttattaaaaatataaaaattagttagatatggtggtgtgcgtttgtaattttagttattcggggattgagtttgggaggtggaggttgtagtgagttatgattgtgttattatattgtaattttggtaattgagttagatttttttttaaaaaaaaaaagggggggtataaaataaggtgggttatgtcgtacggtttttgttcggttttattttttggaagagagatttattatttgtttggtttaggttttttttaaaattttttttagagattttgttggagaattggtatttttataaagttgtttttgagatatgggggagttggagaggttattttagggacggtttttagtagttatttgggttagggattattaggttagttattcgttggggagagtgattagcggttcggtttttttgatagtgtgatttttttagacggggtggtttttgttaggtttgtagcgtttttaggttgtatagaagggttggggtaagtagagatggaattttattcgttgtttgaagtggatttttttttttagggtgagtgtgttcgttttggcgatgatagggacgatgttgattattttgtttaggcgttttataaattcgatgtttaggggtttgaggttgaagtagagggatgtgcgtgaggtttatttgggggagcggggtagtgggggggtatttatttttaagtaggtgtcgatatttttaggtgttggttcggggtttacgggggtttttgttggtaaggatagggtttcgggtcgagtcggttacgttgtgagtgtggggtagaggaaggatacgggtgtgttttagatataggtgatattattgtataggttaggcgggttagggttagttttaagtattttcgtttatgagttttggggttttaattatatttttatatgtttatatagaagggttgtcgttggtttagtagtcgttttgttgtggggttttggttgggaggggagaggtaagagaaatagaagttagtattagtgtgcggtgtttttgtattaggcgggttgtttttttgtattaggcgggttgttttttttgtttgtttggttttagtgagtttggggtttgatgtggggaaagttgtgggtggtaggggttggtagggttttggaattggggtattattttttttagttttggagtcgagttttttttatagtgagaataaatcggttatatatatggttggggagaagttcgtttcgggtagaagtttaagtagagatggttaaggttcgtttttgttttatgggattggacgttttgggcgggattaggtaatatgtttagttggagttttagttaaagggttagtgttggggagtggtagaagtgttatagatcgttcgttcgttttcggtttgtttagttggtattaggagaggtttttgttttttgttattagttttagttgaggtaaagtttggagtagttggaatagttgttataggatcgtaggtgagtcgttttgtttgggagggtagatgtttagtttaggagaggtttatggatagcgggttggttttttgtttttgatttttgttggtttatagaggatgatgttagagggtgggttcgaaaatttcggtttgggtttttttatagattttgggtgaggttcgttgtttattagttaggtttttttttgtatttggtgtttatagagtatggtttttttaaatttttgggtttttttcgtttagggaagtatatttgggatagtaggtgcgaaggattttttttatttatttatgtagataagttatttacggttgtttttattagttatttttgttggtttttggtttttttttttttagttttggtttagggtgagttataggtgtttggtagggggtgtatagggagttgaggatagagggttcgtgaggttatgaagagtttatttgttagggtatatgtagtttttcgtttttgttgatttttaggggcgacgttaggtgcggatagagtcggcgggaggaaagggtttttattaatattaatagtagtttcgtttagttttggaaggggttagtattgatttttgtgtttttcgtttaagaacgtattaaattttttaaggggttttatgaggtagggttcggatgagaaggttagttatcgttacgggtgtttggttgggggtttttattttatttgttagagtttggtttgagaaggtaggatatagattattaggttttagaatagtttagggtttgtttgatttttagttttttaagacgtagttgaaggatgggggttgggtaggatatttgtataggggttagtgtgaggttttggaggtgtagatatggtatatttttaattttatagttggcggttatggtttttgatttagtttttttgtatttagtagtagggtagatagtatcgttttgtagttttaggggatagagggaatttagggtattcggtatgaggacgtcgatattgtagggacgtacgagtggtcggtggcggggatgaagtagaggtagtagtggacgcgggtgttcgggatgcgttttttgcggttgatgttgatttttttttgtaggtatttttcgtattggttattgatgaattttatgatgggttgttagttgcgtgggggatggggacgagttagtaggtatatgagatgttttttttaagtaggtcgtgtatttttaggatttagagtttaatattttattttttaatgaaatgtatgttttgggaggtttggtttgttgagcggagatgttatagttttattttcggttttttaaattagttttttcgggttggttttaggtgatgagttggggatagtaagattttttaggtaattttgttttggtttagaatttttaggtttttgagacgtgcggttttggtagtatgttaggttttaggaggtgggttttgtattttcgcgggtcgggaaatttttagggttgattttgggtggggtttagggagttttgaagttttcgttagtgtttttttttttggaggggttttattagttttcgttgttgatgtggttttcgaattttggtgtgttaattattgttagttttattcggacgtttttttttttaatatttgtatagagttacggacgtagagttagaggggagacggaagatttttatagatattttatatttgattgatttcggggtaattttaggtaggtagcgatgataattaaggagatatcgggaaattaatggttttttttagttaatttcggtataggtcggtgacggtttttttgggagttttttgtttgttagatttttggtggaaaatttagttgtttgtggggagtttagtgtgacggggtttataggggttcgggatattgatttattatagttagagttttaatatgtttaatatgttggggatggtgggtatagcgagttttcgttttggggatttgggattgtttgattcgggtatttttatatcgtattagtgttttaggaaggtatgggtattttatatttttagtttatttttagttattgatcgtgtgtgatggttttgatttttaatttttgtgttttaggaaggtaggggcgttttgtatttttagtttattttcggttattgattgtgtgtgatggttttgattttttattttgtgttttaggaaggtagaggagttttgtatttttagttcgtttttggttattgattgtgtgtgatggttttgatttttaatttttgtgttttaggaaggtaggggcgttttgtatttttagtttattttcggttattgatcgtgcgtgatggatttgatttcgatggttttggggatgcgtttttttgaggtgggttgtatcgattttcggttgattttggatttgaagagggtgttgattaaggtggatttatttaagtcgttttgttttggggagaggatgggaggtcggttaggggttttttcggagagattagtagggtttgtatatggggttttttttatttaggtacgaggttttttagtttgagatttagtagtgtttgggttatttttcggtaatatttttgttaagtagttttcgaggattttattttcgagtcgggtgtttagtgattgtgtaaatttatatagtcgggttttgatgttagtataatttaggttatagtttttttttgagaggtgagtcgggtttgggagagtcggtattttttgtgttttttgtgttttttggataggaggttttttggtggtttagattttggataggatagaggtcgggttggcggaggagtttagggttgtttagggtgtattaggtggtcgggatttttgtagtttattagggtggttgtaattaaagtttaggtgtttaaattgtttttttttgatcggttagggtttgggtaagttatttgattttatcgtgttttagttttttgatttgtaaaatgggataaatagtttttttttcgtggagttggtgtgagtattaggtaggtttacgtatgttttatggggtttgtggggttatgtgttagggggcgttggtttgtagggtggtgttattcgagggatagtgatcgtgtgtgtagatagttagtttataggtgattgagataaacgaggatgaggaagtagtatttatatgtaatataatatatataatttatatatattttatatatatattttataatatatatattttatatgtataatttataatatatatataatttattttaaatatattttttatatatattttatatataatttttataatatatataaataaattatatataatacgcgcgcgcgtgcgcgtatatatatatatatatatatatatatatatatatttttttagattcggagttttattgttttattttgtatagagttgttttgggttacgttagtaatatattaaaaaaaatattttaggttaggtgtggtggtttatgtttgtagttttagtattttgggaggttgaggtaggaggattgtttgagtttaggagtttaagattagtttgggtaatatagagagattttgtttttatattaaaatgtaaatattggttaggtgtagtggcgagtatttatagttttagttacgtaggaggttgaagtaggagaattgtttaagtttaggagtgcgaggttgtagtgagttaggattattgttattttagagtgatagagattttgttttttaaaaaaataaaaatcggttaggcgagatggtttacgtttgtaattttagtattttgggaggttgaggagggtggattatttgaggttaggagttcgagattagtttggttaatatggtgaaattttgtttttattaaaaaatataaaaattagttaggtatggtggtatatgtttgaggtacgagaattatttgaatttaggatgtggaggttgtagtgagttaagattatgttattgtattttagtttgggtaataatgagattttgttttaaaaaaatataatataaaaaatattttaaattatattgatgttttgattttgataatatttttttaggaaaagtgtgggtttttgggaggatagaggttggtgttgggaatttttggtttgaattgtttagtagtttaaggacggatatttttcgtttatttttttttgtttattaggtttgtgttttggttaattttaggttaggagttatgttaatgttttagttacgatattttagatttaggagatgttaattgggatattgtaaggtgtatttttttattattgttatttttattattattattattattattattatttttattattattattatttttattagtattattattataatattattattgttattattattattttattattttcgttattattattattttcgttatttttattattattattattgttattataattattagtattagtattattattaattatattattattattattttattattattattattaatattattattatttttattattattattattattattaatattattatttttattaatattattattatttatattattattataattattattattataattattattattattttttttattattattataattattattattattattattattataattattattatttatattattattattatttttattataattattattattatttatattattattattatttatattattataattattattattatttttttattattattattattattattattataattattattattattttttttattattattataattattattattattttttttattattattataattattattattattttttttattattataattattagtattatttttattattattattataattattattattattattattattattattattattataattataattattataattattattatttatattattattattataattattatcgttattattattataattattattattatttatattattattattataattattattattatttatattattattattataattattattattattattataattattattattatttatattattattattataattattattattatttatattattattattataattattattattatttttattataattattattattatttttattattattattattattattattataattattattattataattattattattataattattattattattattattattattattattattataattattattattattattattataattattattattattattattattattattattattataattattattattattattattattattattattatttatattattattattattttattattgttattattattattattattatttttattatttttatgattattattattattatttttattattattattattattattataattattattatttatattattattattattttattattattattattattattattattatttttattatttttattagtattattattttattattattatcgttattattatttttattatttttattattataattattattattattgttgtaaattttcgaataattataatttgttggggattttgttcggggtttagttcgtttgattttattttatgggatgattttattttatggacgaggaagttaaggtttatagaggaggagtttaggggaagatatataagttttatttcgttgagttaggataaagttgggatttttttcggggtttgtggatttttaaataggtgtttttttattttgtttgtatttttgtaggtgggtatagttgttatgggagggaggagggaggagagtagagttgttttacgttttgttttttattcggtatttttgggagggagtgattttgtggggaattaggattattgttttttttagggttgaaagggcgaagaggtttagataggtgaagtggttttttgcgtattatttttagagggtaaggttgttatagtggtagttacggaaggcgagggttgttgggttgtttttttttttttttggggttaaagtttcggaagaaggtttgtgttatggttgggacgtagaggtttttaggttttttttattttgtttttggttagggagtagggtagttttttcgtagtttatagagatgagttttagtttggttattgtttttgggttttttttttttttttttttttagttattttttcgggaggtagttttgaatttttagggtataagtacgttttttataataggtagaatagggtgggggtcgtaggaggggattttatattttcgtttttttttgaagtaggttgttagtttttaggtagttgtgagtatagtagggttatgagtagtcgggttttatgaggttataggaagtagagaggatattaagattttaggggagttagggtttagattagtgtagaagaggaaagaaaggtgtcgggttggtaggtgtgggtttgcgtttatagagttgggtaggaaggacgtgtacggttggtaaaggttagagaaataggttcggtttgagaggtgtttagatattttgtagaaatttcgtaagtttatttttgtttagggtgtgatttggcgggggtatttttttagatttttttttggatttcgtggagtgggtagaatatagttttgggagttaaaacggtggttgcggttttttgttttgtgagttaaggaattttggtagttttttttgagtttcgtttttgtttggaaaacgggacgttttttttatagggtttttgtgaggtttgaatgggatttggggggttttggaaataataggcggtttattgtagattttagtttggtttttttattttgtttaggtcgtgttgatcgacgatttttcgtggtgatttttagtttttcggggttattagggggtgtggaagttacgaggttttaattttagggtagagttgaagttgagttgttgggaagtttttggtcggggtgcggtggggtgcggtggggagtttggagggttaggttggagtaatagtgaggggatagttgttatagaattttttgtataagttgacgttattgtttagaggtagcgattatttattaggatttgttttaggtcggtttgggttttttaaagttattttaggggttttggatgtgtaggataggtttttttgaggagtcgttggaggttgtgggttttttttaggcgtatgtatgtatacgtaatgttattggtaattcgtttttgaggttagggttgttgttttattttatagaagggaagattaagtttaaaggtttgtgggtcgttttgggggttgaggttggttttcggtattggttgagtggtatgtaaggtgaggatttatcgattattatgatgttgaattcgaagttttgttttatggtttttcggcgtatttgttttaggatggagttaatttttacgtagtcgaagtttatcggggttttttcgtttcgtgatgtaggcgtttgtttgagttcggtatttttgggggtgtcggttatgtcgttaacgtagttgggagtcgttttagtggttggggaaggaatagtagaggagttagagcggaataggggtttatatataggcgtttgttaggtggttgttatatttatttttggatggggaaattgaggtattgaggtttagaaaggttaagcgatttgtttaggcgatttttgagaattttttcgggtggatgtttttggtcgtggtgttttttaaaaagttgttattttgtagttacgttgtttttttagtaaagttttatttttagatttttaaggttaggtttttttatttttttttttaggagttgtgttaagttgggggttttttgcgttttaaggtagggttgattttgaatttttgttttcgtattttggagggttgtttagataagggtggagggtgttttttttttttggttttttatattgtttcgggttatttaggtggatttggtttttttttttatttttatttagataagttgtatcgtttgttgttatttaaaggttttagaagtcgatttacgagttaagatataggagggatggttttgtaagaaacggggatagaattagcgtgtgttttcgttttttatatttttatggatggttttgtaagaaagggggatagaattagcgtcggtttttatggagttgtgtgtttaattttatagaacgagttagtagttttgggagaaggaaaagtgttgggtgtagggcgggtgtttggatgtagagttgtttttgggtttatggaggaggggggtttttgtattatatttgtttttttttggattgatttaggcggtcgttttgtgtgtttggttagcgtttacgggttgtatatttataggttaagattaagttttatttttgggtatgtggggtacgtggagttgaatttttcgaaattattaaagttttttttgtttgtaggttttttcgatggttttgtttttggttgttgttaagatattatatacgggttagaggtttggggttgggggcggacgttcggaagacgtttgttgaggatttaggtgtttttatatagtggggttttaggggtatttaggatggggttggtttttattagggttggttggtatacgggttaggttttagtatattttagattcgttatatttattggtgtatgcgtatgtaggtgtagataattcgttggttatagaggtggtgtttttgttagtttttataggttggagttgtttttggtggtttttagtttttacgtaggttgggcggttgttgttttgtgttttcgtttttgtttgggtttatttaggttttgttttgtttgcggggagatttttgttttattttgttttttagggaggatttggttttaggtattttgcgttaagatagggattatacggtacgtttttaggtagggtttttttcgttagtttttcgggaggggagtggtttttttttgggatcggtgggtatttagtaggggtagttataggggagtggagtcggcgtgggagttagggttatagtacgggaggttgtagggggtttatttttcgtgataggtaagtgagtagtttttttagataggaggtagttttttcggtttacgtttattttttattttgtttagaaggtgggaggtaggtttttaggttaggaggggtagtgggagattttagtttaattgtttttttatttgcggggtaagaatcgaatttaggaaatgtttattgagttttttggttgtagtttgtatttttagtcgatttaagttatttttttcggtttattttattggagcggttagagggtgtcggagggaggttttttaggtttgaggtattagaggtgagagaggaaaagattttggaagttagaaattgggggttggtttatttttataggtattttttcgtttttttagtttttatagggtataggaatttttattttatggaattgggggaataaaggaataatataattttttgttgggaaatgttaagggggggtttatatatttttattgttgagagtaatatttataggcggatttggaggttagggtttttttttttgtgtttttacgtggtttttatttaggttacgtagtttggaagtttttagggttttgtttttgtttttgttttttttttagaaatatttttttttgggtttttaggatttttaaataaataaagatatagttttgtatttggttatggattatgtggttttggggtcgttttttgaagttagatatggggttttgttttgcggggtagtagtttagtttttatttacgtgatcgaaaatcgtttttatttgtttgtgggtttgagagttattttgtttgggattgggattagtttttattcgtttttatttttttttagtattttttaattttttttagtaggatttggggggaggcgttgttttttgaatttttttttttcgtttttaacgtttttggagtttagagcgagggaggggtcggtttagttgtagttgggtttttttataggtattagtatttattgtagaaatttaaattaaattaaatattttgtttattaggggtttcgtttgagaaataataatataacgtagtcgagttttatttttgttattgacgtagggtagtggtttgttttttgtataggtgagagttatttttgtaatttttttttcgagaggcggttttgtaggtttcggttggttcgtaggtaggtacgtacgtagagagtaatgtaagagttcgtttcgtttttttatttggttaggtgagttttggggtttgtttttaggatttttaagtgggaaaagtagagatttttatatttagagatatttttattttggttttaggatattatggtgtttagatagttggaaataatggtaaagattatttattttattgtttgtgattacgatatcgttcgaggtttgcgttgtttagcgtggtagttattggttacgtgatttttttttttaattgttataacgtttgttacggttattattttgaagtgtgtagtttagtggtgttaagtatattcgtattgttgtgtaataaatttttagaatttttttattttgtaaaataaattgtttttattaaataattttttagttttattttttaagtttttggtaatttttattttgttgtttttttgaatttgattattttacggatttggtataagtggaattttataggattgtttttttgtgattaaattattttatttagcgtaatattcgaaaggtttatttttgttgttgtaggtattttaattttttttttacggttgagttaaattttttgtatgttttattttttttttttttttttttagatagagttttgtttttgttgtttaggttggagtgtaatggcgcgatttcggtttatcgaaatttttgtttttttaggtttaagtaatttttttgttttagttttttaagtagttgggattataggtattcgttattatgttcggttaattttgttttagtagagacggggtttttttatgttggttaggttggttttgaatttgtgattttagatgatttattcgtttcggttttttaaagtgttgagattataggcgtgagttattacgttcggtttgtttcgtttttgatttttttatttatttgatcgcgggtattcgggttgtttttattcgttggttattgtgaatagagtcgttatgaatgtgggtgtataaatatttttagttttttaagatgttgtgtatttttttgaatttatatttagaagtggaattatgggatgttacggtggttttagttttcgttttttgaggaattgttatagtgtgtttataagtgatttttgagtatttgatattgagttagtttaattgaggaacggaatttttatttttatttaaatttaaatagttatattttataaatggtaattatattggatggtatagaattttagtttaatttattttttattaatggggaaattgaggtttatagagtgatttttttttttgaaatgttattgtaagtggttaggttagtataagatttttattgaatttggtaattttgaaattttatatttttgtttgtatgatatgcggttaatatttgtgattttttttaaagatcgtgggttttagtaagacggtagttgtttcgttgagatttttatcgtatttttaggtttcgttttgttacgaatacggttgtgtaaggatttgtttgggtttttgttttttattttttcgggtatttagattaattattagtagtatttacgtcgatttttagaaaggttttgatttggatagtaattgatacgttattttatagttaaagtaaaatgtagagtttttttttcggtttcgtagttgggagttagaggttttaggttttggtttttggtttaaagtgattttttgtaagtttttttagtttggtaaataggttatgtattttttgattttttttttagtttttgttttgcgagtttttgggtgttcgaggttgtggtttatttagtgatatttttagtttttagtgtagttcgtgagtagtataatatattcggttttagaaataattaatatattcgttaatagatgcgtggagaaatttaacgtgttgagttaatatagcggattattttttagttataaaaaggtacgagcgtgcgttaatatagatgaattttgaaaatattttaattgtaagaaattaagtataaaaagttatattttttagggttttagttatatgtttagaataagtatatttgtagggataaagcgtagattggtgatttttaggggttgggggagggggagtgattgtgtatcgaggatggcgtttttttttggggtgaggaaaacgttttggaattagaggtgatgtttatagaaggttgtgaaaaaatgttatttaattgtgttttttgaatcggcggatggtgtaatatggaaattatatttttatgaggacgggagaggaagggaaagaagggaaggagggagggggaaggaaatagggaaggaaggaaaaaagggaggggaggagggagggacggaagaagggaaagaaggtagttatttttagtggagttggattgaagagtttaatgggtgtagtaaattattatggtatttgtatttttatgtaataaatttgtacgttttgtatatgtattttagaatgtaaagtaaaataaaataaagagtttagtgttttttataagtgtttaggagttagttttatagtttagaggatagttgaggtttagaggttaatatttaggtttgaggtttttaagttggtgtcgttagattatgttttagataaatttttttatttttttgtagtaagggtgtttttagggtggtagttaggcggaggtgttaggtggcgggagattttgatagtttttttgtaggtttttattttgaatttaggttttatgttagggtttttttgttatttattggcgttggtggtagtaggttatcggtttcgtgatggggattgtttttaaatttgtttattttggggattagttttttttttttcgtaggcgtttattgggttattttttttttagagttgtaggtgggtttaaggtagggatgaaagggttgtaatttacgtagttttgagttagtattttttgggaatatttgtatttagtgataaatttttattttaattttaggatttgtcgaggatgagggaattagattgttgtttgtggttgggacgggggttgtaggatatttggttgggaggtagtgtttagagaggaggtagttattggatatgatatattttaggggtatttatatttattatagttttagggttgattttggtttatttggtttggtgtcgagagagggtttgatatagtaggtttgtaaagtttgatttggaaattaagatttaggggtcgtttttttttgtttatttttttttgtgtgttatgttgtttggtttacgttttagaaatgtttatataagttttattagttttgttggttaaatgtagagatggtgtcgttggggtaagggattttgagttatcgtttaatgttatttttagttttaggggagtgatagtcgggtttgtattttaggataaagtgtttagggttaagttaatgttatttttttgttttttttaaatttaatttatatttggtttttagagtacggatcgaaatggttatatttttatatattttgtttgttattgttaatggtggttaagtagaatgtaaggttattttttttttgtttacggaggtttgtgaagttattgattaggttacggtaggggagtcggtggtatttattatattttgttagttttttaggttcgtgtttaggagaaagttgtcggtatttatagttggtgtttttgtttcggcgaagatttttttgtttttatttatttcggtttagcgtgggtttagtagtttttttattttgtttcgtaataatgtatattggagtagtttttagttgttttttttttgtaggtttttttgaatttagattttggggttagtatttttgcggtagttttacggttatttgtaggtttttttagaaatttgagtttatgggggtattttaggttttataaattaatagatgttttttgttttttataaaggggttttttaaagttgagtgagtttttgatgtaggtaatgttaggaggatagtgttcggttagggttgtttttttttttttttttatttttttgggtgtttgtaaagttttttagatttttgttgaattttggggaagttttgtttcgtaattagggtttgtttttttcgtttttatatagagtttgttttttgcgtttagatagtttttttacgatggtaattgaataatgatgtgtgcggtttttttttattataatttttttatatagggtttgtgaagttagatattttatttattacgtttattttagttcggttttttttagagtagcgtagggtttacggtaagtttcggtaaaaagtttggtgaatgaatgaataaatgaagaaataaagtttattatagtagtcgaggtttattgggggttttttgtgttaggcgttattttaatttttttttttagagagtgggttttattaatgttggttaggttggttttaaatttttggttttaagcgatttttttattttggttttttaaagtgttgggattatagatataagttattgtatcgagttttaggtgttattttaaacgttgtttaggagttattataattgatggattattatataattttataaggtagttattgttattgttttattttatagataaggaaatcgagatcgagagggtttttgttaattatgagggtcgtaaagcgagtaagcggtagagttaggatttgaagttaggtaggtgagttttaggttgttgattttttttttaggttaggttttcgggaattatggaaaggttggagaagtatggggtttttgtagttaggatttagaaggtgtagttgcggtgtaggtagtttagtattgaggttttggtttttagttttttttttagttgtttttttttagggagttggaggtagagttttgaattgttaggagaagattttattcgttagttagggaaagttgttagggttttttttagggtttagagttattttaggtttattaaagtatattagtattttagtttttataattttttttgtaagaaagatgatggtattagttattgggtcgggttgggggttttagattttaggggtttttttaggtttgtttatggtttttttaggatatagatgtttatttgagaaattttagtgtattaggggttttatagttaaaataaagaggtagagttgttttggggtttttgttaaagtttttaggtagatttatttagtagatattaaaatgtttattttttatttgaaaattttatttttaggaggtcgttttaggttgggttgataaaatttatagagattttaatgatgattttttattttaggtatgagtgagtgggtggagggagaagttattgttaattattaatagtttaggaaatgtaggtaaaggaaagagaatggtaaggcgatagggttggaaattagatatacgtgtagaggtgagtagattttagagaaagaattgttttggaataagatggtaaagaaattatagataataatggtagacgatgattttggggttttagtggattaggattataatattgatttatttgataagtatttattgagtgtttattttatagtaataaaaagatgatattataggtttgagagtagttagaatgaaaatagtggtggtatatgggaatttgaagtttatttatttaaatgtttattagtcgagattttcggatagatttgaagtagtttttaatatgtaaggaatttataatttgatatagtagtataggatatgtgtgtgttataaatttttggtgaaaagtaaagattttttttagaaaagtatatattgaagatagatagatagatatatacgtattttgaacggtttattaaagaatttttaggttcgtggattttagttaaaaaaataatttggtattttgggaggtcgaggcgggaggatcgtttgagtttaggagtttaagattagtttgggtaacgtagcgagattttatttttataaaatgaaataaaataaaatgagaattaaaaaaaataaataaatttggtgtgatgagaatttatagaatttaatagggttattttagtattatttgtagtattttttaaatttttgattatatatataaagttttgggttttatagttagagaagagggagagtaggttaaaaataattatttaaggtggaagatgagtttgagaaataaagaggtaagaggagaagattgaggttagttgttttttatttttgagtttcggtaggaggaagtttttaagtgagaataagttgttgtttgcggagtggattttagagcgggtggatagagacgataaggaatgttatttttggggggttttgaaaataggatatttttttattttaattttgttttttattgtattgtgtttttattgatttatttaagttattataaatattttataaatgttattggggattttttgtttttttttaaagatggaaatattgaatataaatgattaaattgtgtaaatgtgtgtgggtgggggattaaggattgaatttttaaaatgtatatagtttatttaatttgttaattaattttaaattaaattatattttatattttgtatgggataggaagcgtttttttaaagtttggttaggatttgggatgtcggaaatttgagattttgttttttttttttgagatattttgaaattttgtttagaaatcgagtataatggttttggttttttagagaaagatacggatttgtaaaggtaaagagttgtattttttttcgagttggagtttttttcggtttttattatggggtttaaataaaattgtagttttatagtttttttgttggtgtttttttttttttggtgattaataaggtggaagagttaataagaattttgtgtgtttttttgtaggatttggaagggataggtggtgtgagtttgtttttatttagtttttttttttatttatttaggggtcgaggcgttttcgaggtagggggcgggggtttttatttttattgtcggttaaggtttttttagtttttttttcgttaaatttttttaagtaaattttttttttattgtggaggaaggaattttaagtagttttgtttttttgttagtacggttttaattggttttagtcggtaaagttaaatttggataaggtttaagggttttttatattattcgtcgttttttggaagaggtttttttttgtttttttatttgtaatttattatttttttagtttgagtttttttatttaggtttcgcggtttattgagatattaattttgggttagagtaagttttgatttgtaaattattattatttattttttaaagagttatttttagaatttaggttgtagggagggtaggttaaggatgaattttttgatttttggtgcggtgtgtggtggggggggttattttatattttgttttttgttgtttttttgttttgttttaggttttgaagtggatttattgtagagggagggttagggaatggttttgatgttttttttattttaaggaattttttagtaggagcggtttttattttaaagtaattttaagatttagttcgtgttagttttttagttatgtttatagtggtttgttaattagagatttttttagtttttggtaaatttgtaaatttataaagagaaagaaaagttttttcgtgggtgggtggatattggttatttgttataggttggaatttttttttattagggatgttttttaagtaggggttggggagggtagggtttagagtttttttttttttagttttttttgttattagtagatttgttagtagatatatagtagagtttagtagtgaggtaataataggggttgtgggggttggggtttcgttttttttaatttatgaaattatttgaaataataaaatttagataagggtttttggggtgtaatagggtggttttttgttaggtgttgggtagaaaaaaagtttttttttaatttttttttgttgtgtagattagttcgggttttggggatgttgtagaggttgttttatgtttaggttttttagagatagtagggggttggaggtacggtttgtttgggggtaggggataggtagggaggggtatatttttgggttatgagtaggagtttgattaaatgatttttttaggagggagaaagatatcgtatataattgtttgattatagttagaggggttggaaaggtgggggaaaggggtgaaggggttaattgttttaggtgtttttaatttatgtagtatttatttggattgataagagttgagagattggaattgtttttttttttcgtttttaggttttgttttaggagtttttttgtttaggagtttgggagttgaggaggtttggaagtagtgggtttatagtgttatcgttttgggaatttatagtgttttggatgtggttttttcggttttagttttgtaggtagtttatttggattgtatttattttttagaagagttgtttagaattttgtatgttcgaaagaaagattaattaaagaagtgaggaagttaaagagaggtttatgaaagtttatgacgtattttttaagtgtatattttagtaattttaaatgttttttgaagtaaggatggggatggatggttggataaatggatgggtgtatgggtgtgtgaatgggtgagtgggtgggtggatggatggatagatggatgaatggatgggtaggtggatgaataggtaggtgaatggatgggttggcggatgaatgagtaaatggatgaatgattggatggatgggtggatgagtagataggtggatgagtgaattggtggatgagtggatagatggatgagtggatgagtagatgagtgaatgggtggatgagtggatgggtgggtgagtggatgagtagataagtggatgggtggatgagtggatgggtagatggatgggtgagtggatgcgtggatgagtggatggacggatgagtggatggatggataagtggatgggtagatgagtggatggatagatgagaggatgggtagatggatgggtgagtggatgggtgggtgagtagatgggtggataagtggatggatagatgagtggatgggtggatgagtggatggatatatgggtggatagatgggtgagtggacggatgatgagtggatgggtggatgagtggatggttgagtggatggataaatgggtgaatgagtggatgggtagatgagtggatggatagatgagtgaatgagtggatgggtggatgagtggatggatagatgggtgaatgagtggatgggtggatgagtgaatgagtgaatgagtggataggtggatgagtggatgggtggatgagtgtatagatagatgggtggatgggtggatgagtggatgggtgggtgagtggatgggtaggtggatgagtggatggatagatgggtaaatgagtggatgggtggatgagtgaatgattgtagataggtggatgagtggatgggtgaatgagtggatagatgggttgataggtggatgagtggatgggtggatgggtgggtgcgtggatgggtgagtgagtggatgggtgggtgggtggtaagatgggtggataggtatatggagtttatttaaggagttttagaaatatatatatatttttttattttagattttttttaggaaaaagtagtgtgtatggatcgttatttggttatattttgagatagttatttttattttttttggaatatcgtttggggggatgtagtatagggtatttaagtaatttttgagtttagggtagagatattaggaagtagtaggtaggtcgtgatttcgtaggtttgttttatggtttttgttgtttgtattatggtatgaagtttagatgtatttttggatttggggttttgattagatggagttattaattttttgaagaatgaaatatataggggttatttttgttttttagttgtagggaatgacgattatttagttttttttttttttaaattttttttaggtttttgtgtatggttttgttgattttttttttgtttttggttatttttttagtttttgtcgttttttttttcgtttttatttacggagttagttttggtgttttgagagtttttttttttagttgattttatttagtttttgagtatttaatgttaataatgttattttttttgtttagatttatatttgagtgttagtttgatttatagacgtgtttttgggtttcgttgtgttaggttttttgttgggttttgggtatttgtagttattgttattgttaagttttaatatttgaaggtattttgaatttaatgatcgtgttttaggttgaattttggagtttttattttatttgttttttattttattttttatttaagtgaatagtttttttagttaatagttattgtagttagatttttaggggtcgggtttgggttttttatttttattatttcgaatttatttatttattttaaatttttattaatgttaatttaatatattttatagttattattattagttgtttttgttcgaattttttttttttaaagtattagggggcgtgtgtaaaatttattaatttgatgatttttttttatgaagtcgtgattggtttttattgtatttgggatatattagatttttgtggttttagaattttgtttattatcgacgtgttgtgtgattttgagtaagtaatttaattattttgtgttttaatgtttttatatgtgaaatgggataataatatttgttttataagaatgttggggattaaatgagatatttatttatgaagtatatagtgttgtgtttggttagtaaatgtttgaagtttttgttaataaaatatacgtttttaatttattttttagtttttatttacgtatagtttttttggttgttttttagtttttttaataaggttatttatagaggttttttttgtcgggattattttttttttatgttgtttttagaatttttatttgttttttcgggatagtttatttatattgggttttttagtttttgttttgttttgttttgttttgttttttttgagatggagttttattttgtcgtttaggttggagtgtagtggtattatttgggtttattgtaagttttgtttttcgggtttacgttatttttttgttttagttttttgagtagttgggattataggcgttcgttattacgttcggttaattttttatatttttagtagaaacggggttttatcgtgttagttaggatggtttcgattttttgatttcgtaattcgttcgtttttgttttttaaagtgttgagattataggtttgagatattacgtttagtttaggttttttagtttttatatacgtggtttttcgattgttgtttggggtttgtcgtatttattatttataaaattttatacgttcgaagtatttagtaagacgttgtgaatgagtgaatgaataaatgaatgaatggttagtttgttgttttttcgttcggtttttcgttttttttagattagtatgggggtagttacggttttcgtttatttcggtaatatcgttttttttgtgtcggtcgcgttggttagagtttttttttacggcgttttcgcggtttcggtgtgtggtcgtttgtgaatgagatttatgattttcggtttttattatttttttggagttataaagtattaaggcggaaggatggatgggttttttgggatagtcggggtgggaggtcggtttaggaaattttttttaggaaatggttagtgtgggatgaggcgttcggtgggaggggagtggagtggggatttggggtttggttgttttgtagttagggattttaatttttattttttttttcgtttattttttaattttagtgttgggtttagggtttttggggttttttttaggaatatagaagatatagtaaggattagggatataggataggtagagtttatgggtaggaggtttttagttagtatatttgagtttatgtttggttttaattagatattgagattttggttaggttattttttacgttgaggtaggggggttttttagaggttattggtttttaagtatcgcgtggaagatatgttacggagagttagtattttttgagatattagtagaaggttagacgtttcgcggtttaaggatgatttggttttagcgtttatttatttgtcgttttgtatgaaaagtttgacgtgatatggtcggttttagcggaagagtgattcgggaatcggtagagcggatttagtaattggtaaattggatttagtaattgagatattgttaggggtttggtagaagttttttaatgtattagatttagttttgatttttatagagtttagtcgagtattaaaaggtgtagaggtcgagttgagtattaggggaatattgattttagggttgatcggtgttgtgcgtgtattttatagtttatagacggtttatatttattcgatcgtatttgatttttttttgcgaggttttttttagatttttcgttttttaaagttattagttgtgttttttgaaattagagtaaagtaataaaattgtagtaatagcgtgtttttatgaacgttgtgatgttagttggttaaatgagggagtttttagggttttttatattgtttcgattttgtgtgttttttggttttggtttattttttatattttttgttttttttttttttttttttttcgaggatttagggtttggggttgatttattgtgggattttaacggtgattttttggaagaaatgttcgttttttttttttatttagtagtgatttttggttcgtttacgtttacgtagttaatataggtagtagtcggaatttggaagtttttggggtgggagtttgtttttttttaggtttttttagttcgaatttcgggaaggagttatatttatatggtaattttttttaaggttgggagggggaaggggtttggttcgggtttgattatttttttgaggttgcgtttattgggttttttaagttagttgggtttttcggttgtatttttgagggatggtaatagattatagtgtaaattgtttatcggttggttgggtagtgggtgtttagatgcgggttagggttttcgttttataggttgtgtggtggtttaaagtgggtatttttatgggtatatatttgtgttatagtttattcgtgtgtgtgtgtgtgtgtgtgtgtgtgtgtgtgtgtgtgtgtgtgtgtgtgtgatagtttagaaatatggtaatttatagtttttttaagacgttggttttgggagatttgtttatttgggggttttagtatttttagttttttttaggaaggttttgttttttttggtttgaagttggttttagggaagaatttttttagaaaaataaaagttattttttttagttttagtttagtttttttttaggggtgagttatattaaatttattttttttttttttttttatttttttttttacgttgtaattagttgtaagtggtttatttatttaggtttgttagtttattatagaaaagatattcgaattttgtattttttttttttgatttgttttgggttttaataggtaaaggaaattggaagttagtagttaggatttagttgtaggttttcggggttattttgcgtttttattttagttttatttatttttgcgttgatttaatgtttatttattttagtttatggagcgaggtttggatttaagataaaataaagggggttttggttttttggggtttatagtgttcggtgtcggcgagataattttagagtatagtatagagaaatggttgcgatacggattcgtagtatttggttggttaagtatagtaatgtatttttattaggtttgggttttttagtagatatatggtttaaaggttggttggttaaattatatgattttgtaattatttaagagaaatgaaaatatgtttatataaaaatttgtagattagtatttattgtagaattttttataatagaattatgttaaaaagtagaaataatttaaatgtttattagtagatgaagagatatatagtgtggtttatttacgatggaatattattcggttatgaaaaagaatgaagtattagtatttgttataatgtggatgagttttgaaaatattttattaagtgaaaggagttagatattaaggttatatattgtacgattttatttatataaattatttagaataggtgaatttatagagacgaaggtagatgagcggtggttaggggttgagagttcggagttgggaatggggattggttaatgggggtagggttttttttggggatgatgaaatgtgttgggattaatggcgatggttgtgtaattgtgatggttaattttttgtgttagtcgggcgtagtggtttatgtttgtaattttagtattttgggaggttgaggcgggtggattacgaggttaggagattgagattacggtgaaattttatttttattaaaaatataaaaaaaaaaattagtcgggtgtggtggtgggtatttgtagttttagttattcgggaggttgaggtaggagaatggcgtgaatttgggaggcgaagtttgtagtgagttaagatcgcgttattgtattttagtttgggcgatagagcgagatttcgttttaaaaaaaaaaaaaaaaatttttgtgttaattggattgggttatggggtatttaggtaatcggttaaatattattttgagtgtgtttgtgaaggtgtttttggatgagtttaatatttaatttttttattttttagaaagtttagtttattgttagtatttatttaattttatataaatacgttttttgaggttgaagtaaatttgattggatgttttgtgtgaaaattaaatataaaaattggttaggcgtggtggtttacgtttgtaattttagcgttttgggaagtcgatatgggttaattatttgaggttaggggttcgagattagtttggttaatttggtgaaatatcgtttttattaaaaatataaaaaattagttacgtgtggtggtaggtattttgtaattttagttaaatttaggaggttaagattggagaattatttgaatttaggaggtagaggttgtagtaagtcgagatcgtgttattgtattttagtttgggtaatagagagagttcgttttaaaaaataaaaaaattaaaaagaaaaaaaattttttaaattgtttttgtagttatttttaagtaaaataatagagttatttgagtcgtttattttggaaaaattagatttattaaatgaatttttagttaataattgattaagaataatgttaatattatttgtaggaatgttgtgttttttaggatttgatatttttagcgatcgagaattattatttttttttaaattttatttatttatttattttttgagatggaattttgttttgtcgtttaggttggaatgtaatggcgcgatttcggtttattgtaatttttgtttttcgggtttaagtaatttttcggtttcggttttttaagtagttgggattataggtgtttattattacgtttggttaatttttgtatttttagtagagatgggattttattatgttggttaggttggtttttaatttttggttttaggtgattagtttgttttagtttttttaagtgttaggattataggtatgagttattatatttagttgagaattattatttttttttaaaggaaatattattattaaaaatggaatgttataaatagaatgatgttttttgtttttaaagtcgatatattagagtgatgtgaaaataataataaaagtaagatatttttcggtaaatttattttggggtgaacgttgtagttataagtattgttggtgagtattttcggggtaaataggaaaagggtgtaattaggagtttgggtaaagtagattgtgtgttttgatgggggtgggttttattcgattagttgaaggtaatagggtttggaacgtatattttaagatatagtgttttggtatagtaaatatttttagttgaaggaatttaagaaatggtaggtttaagaagaatttattgatttgttttttttttgaagtagattataagttttttacgtaagaggtgttttttttatatttagcggaaaggaatagttttatttttagagatagaggatttgagaggggttttagtatataggttttgtcgagatttttacgggtttattgtttagtttattttttgttgttttgttatagttttttacgattttttattttttattaaatttagtataaaaacgtttaggtttaggttaggtatagtagtttatatttataattttagtattttggaaggttaaggtggttagattatttgaggttaggagttgaagaatagtttggttaatatggtaaaattttatttttattaaaaatataaaaattagtcgggtgtggtggtatacgtttgtagtcgtagttatttgggaggttgaggtatgagaatggtttgaatttaggagatagaggttgtagtgagtagagattatgttattgtattttagtttgggtaaaagataagtaaaagaaataaataaaaaaattgtttaaaataagtaataaataaatttaaaaaataagtaaaataaataaaaattgtttaggtttaggtcgggtatagtggtttatatttgtaattttagtattttgggaggttaaggtaggaggattgttcgagtttaggagtttgagattagttcgggtaatatagtgggattttgtttttataaaaaataaaaaattagttaggcggggtggtatatgtttgtagttttagttatttgggagtttgagttgggatttaagagtgggtttagagtagttttcggggtcggtagttgggttttagtttgagtttaggaagttaaggttgtagtgagtcgtgatcgggttattgttttttagtttggacgtgcgatagagtgagattttgttttaaaataaaataaaaatcgtttaggttaacggtttttttgggtttttatttttttatgaaggttcggtgttaagtaaaatttatttgaattgttatgtttgttttttgttaatttttgttagtttaatttttagggttttagttaatgaatttaaaatcgatagaaggaaagggtttttttttagattttgttttgattaggtttttgtaattttgtgataaaggtttgaaggtttgaataggaggatataaggtttgagtgagagagaatttttttcgtttaatcgtttttaatttggaatattagattttttttgttttagatttaaattgatatatgcgttttttttgggtttcgggattggaacgacgttattggtttttttgggttttgggtttttaggtggatattagagtcgtaatatgggttttttcgtgtttttagtttgttgatttattttgttaattttggtatttgttaatttttgtaatgaggtgagttaattttttataataataaatttttttatttaaatatacgtatatattttttattggttttgtttttttggatgattttaatataattattttgtgaatatagtaaaattattgaattgtagattttaaaaaggttaacgttatagtatgtgaattttatttttataaagttattatttaaatagtaataagaagttggtgagttttgtgtatttttttgtaaataagagtagggatagcgtcgtttttgttttcggatgtttttagtttttagttcgagtttaggaatattttttatgtgtttttttttttaattttgtagtttaagggtgggggcggtttttagtttggtattttttttgtagttttttattttttttttatattagttaatggatatagaggtttttttatggatttttatttttatttatttatttttatttttttgagatagagttttattttgtcgtttaggttggagtgtagtggtgtgatttcggtttattgtaattttcgttttttggatttgagtgatttttttgttttagtttttcgagtaattgggattataggtacgtgttattatatttagttaattttttgtatttttattagaggtagggtttttttatgttggttaggttggtttcgaatttttgattttaggtgatttattcgttttagttttttaaagtgttgggattagaggtgtgagttattaagtttagtttttttatagatttttaaaagggttttgggtaatatagattgggatttgttaagttattaaatgatttttttaaataaagaaggaagttataaatttttatttaaaaggagtgggggatggtaatagaaatatagttagttagaagtcggaagggttttatttaatttatttttaaggtttttgggtagaagggataagggaaaatttgttttttaaatattttattcggtattttatttttcggatgtaagatgtagttgtgtatagcggtagtagtgaggattttggtttggtaggtttttatattttttgttgagggttttaggggttagggttgtttaataggattaagaggaaatgattataggagtttttagttgttgggggtggttttcgcggttttttgggttatttttggtgaatttattttaaatttggaagaggtttaagttttttcgtttttcgtattttaaattttagttacgttagttaggagttttgggggatgagaaaaaatttaattaagttttattgtgttgggtgatataggatttagaaggagaggggtttttggattgtttaagtttaatgataattttagtagttgggtttttaagttaattagtttttttttttttagtagttttcggggagtattacggtgagttgtgaggagttagtttagtacggtatatataacgtaggggttttttcgtatttttattttataaatattagggtttttcgggggattagttttttatttttgagttattttttttttatcgtttttttaataaggaatagagaaggagtttttattgtttaattagatgtagaaattgacgtacgtatagagaggttacgtgtgatatggtttggacgttgttttttttaaattttatgttgaaatgtgatttttgatgttggaggtaaggtttggggggggtggggtttgggttatgggggtggattttttatggatggtttggtgttttttttacggttataaagttcgggagatttgattgttatagagtttgggagggttgggtgaggtggtttatatttgtaattttagtattttgggaggttaaggtgggtggattataaggttaggagtttgggattagttcgattaatatggtgaaattttatttttagtaaaaatataaaaaaattagtcgggcgcggtggtatgcgtttgtaattttagttatttaggaggttgaggttgtagtgagtcgaggattgtgttattgtattttagtttggttgatatagcgagattttattttaaaaaaaaaaagagtttgggagttttttttttcgttatgtgacgtgttagttttttttttattttttattatgaggaaaagttttttggggtttttttagaagttaagtagatgttggtattatttgtatagtttgtagaatcgtgagttaaataattttttagtttcggttattttttatagtaatttaaaatggacgaatataatgtattagtttttttttttggattttatagtgtgtttggttggggttgtgttttggggaaatggtaattgcgaggtttttatagatcgggttcgggttttaattatagtcgtattttagcgttttgatattgttgagtggatgtttaaaaagtattgttgggtgaatgtgcgagtgaatgatgaagatggaggtggttgttggtgttagggtaaggttttaggagtttggggaggtggtattaggtagtttaggttaacggttaattttggatagggttaggaggtagttagaatggttaaggatagttaagggattttaggtaagtggttttattttttttaggcgggtaggaagtaggaattagattaaggggtgttaggtggtagtggtatttagggggtttgaggagtaggtgtaggtttagtagggttggtggtgttacgtgtggggtcgatcgtggtttcgtttattgtttttattttttggacgtatgggtttatggtttttaaggtttttttttgtttttacgtttatttttttaggttttatttttagacgttaagttatttttttatttttatttttttcgttgtttttatatttgagttgattttttttttgagttttggtgaaattttagagagtttagaggtgtagtttatatttttgcgttataaggtttttgtagtttttatttttttgggatattttattttagagttgggtgtgtatttattttattggattagaaattttaggaatgtttattttgtatgtttttgttttttatttttcgttcgttatttagttcgtggttgttatgtggttgggttttggtagttatcgtagttggtaatatataattagtatttttgtgtttaggtttcgtgttgagtttttttagttttattttcgtttgtttttaaaatggtttttgatatggtaattattattatttattttttagataaaagattatagttttaggagaggaggaatggtaggtttgaggttacgtggttcgtaataggtaaatggattcggtagttattttattttcgagtggggtttttttttgtttgtagatttcgttgaggttttagagtttggagttagtgagtttttattgagtataaggatagcggcggtgtcggggttggaataaggtagggaggggttttttaaattatagttttggttgtggatttattttgggatttcgttttggttgggaattttgttttagtttattcgggatatttttttattttgagttttgtattgggttgtgtacggggtttgttgaatgagtgagggtaggagggatggtgagtagggtggaaagcgattatggtgggtaggtttttgttggaagtttgaaatatttttggcgagtaggaaaatattaggggaagaggttatagtttttagaagggttcgttggggattgttttgtagtttttttatcgggataggtagaaaatttagtttttttttagggtgagtttaggaagtttgtgggggtataggttttagttagggtggcgcgtgggtttatttaggggacgttgtcgtggtttagagttaggttaaattttatgtattttgtaaataattatttataataaataaggtttatttattttttaagaagagtaaaatattataggaggtatttttttattaattaaatacgttatagtgattttattgcgttattgagggagggtattagggtgttcggtttagagtaaattgtggttagggggacgggtatattgttaaatcggttagatttttatttttgaaaatgtgggttaaattttttttaataagttataaggaaatttagtgtgaattttatgtttttattattatcggttgttttggaagattgggaggaggggttttgttttttttttatttttggttatagggtttgaggttataatttggattgggattttaattttttttttggggaagaggtttatttagggtgtttgttaaggtttagcgtataaatacggaattcgtttaacgtttgtttcggtatttttgggttttttatattgggtttttttatttgattttttaagtagtgagagtgatgggatatggggcgtttttaggggagatttggggagatggagtaagttttttagtttaaggtgaggtttcgaggtatggtttatgtagtgatgttttttacgggaggtttgaggtatgattaggagtttggagatttagtagaggtttgggtatgggattttcggtacgtagttagagcgagggtcgaggttgtatggatgtaagtaggtgattttgtgttatcgggtgttatttgtgtcgggttttgtgtagtcgtttttattttattgagttttagggaggtgaggtaattattttaggtatatagtttcgggggtaaaggttggatttaggtgtgtttgattttagaatttaagaagataagtagaggagtttgagttttttgagatcgtagtgatggtttagtgttttaggatggttaggttggtttttgtagttttagttaatcgtgtttttttttagttatttagggttttagcgttggtttttgagatttggtattggttataggggtttatttttggttgtggatatttagtgttggttattgggatttggtattggtcgtggggatttgtttttggttgtggggatttagcgttggtttttgagatttggtattggttatggggattcgtttttggttgtgggtattcggtgttggtttttgagatttggtattggttatgggggttcgtttttggttgtgggtattcggtgttggtttttgagatttggtattggttatggaggtttgtttttggttgtgggtattcggtgttggtttttgagatttggtattggtcgtgggggtttatttttggttgtagggatttagtattgtttatggggtttgtttttggtttcggggagttagtagtgtttgtggggtttatatttggtggtggggatttggtgttggaggattttgatagtaaaattatagaggcgataggtaatagtaatttattagtatagcgtgtggtttgttttagttacggtatttttttttattttgtgtttttttattataaagtttagtgtaggtaacgaagttaagaggtggagaattcgtaggaggacgtatattatatttgtttttcgtgtggcgtttttgtattttgggtggttgagattttttgttttttttttaggttttttcgtgttaggtttgcgttgttttttttggtttcggtttttatttattcggttttttagttatagatagtagcgatttttttttttatttaatggggttattgtttagtttattattagtttttagggttggtagatgatatcggttacgggtagtgtttttttcggttttagtatataaggtataaaagatattattttgttttaagatttttttagttacgtggcgtatgggaagcggtgtcgggaattttttagggtagttttttgtttcgggggagatcgtgtttaaattttcgaggaaatgttgttttttggttttttttttgaaaaattttttaaggagattttgtgcggagcgtgtagggagaatggagatttttgtgagattgtttcgggatagttttatagaaattataaattatttggataaaagttgaaaatttgcggttatataatgttgattatttatttaaatattcgttgagtaagtatttatgacgtttgggaatttaggacgtggatcgataagatataatttttatgttcgttttagtgatagagagagagacggtattattaatttcgttcgttgggggtttttttggagggggcgtgtaggtttagggttgaatttgtttagtggatgtgttatttacgtttgcgtattttttggttttgtggtggtttttggaataaaggttgagagataaaagataaggatttgggggagggaggacgtttatgtatattttattggggatattagtaaggatgattgtttagtgattatttagtgatcgagttatttggtgtttggagtttggtatttatagagtagggcgggggtagtaggttttgtcgggggtataggtttgagaagggagtgttgttagttaggttcgacgggatagagagcgaagggttttttttttgaaggttatgtagaggtcggaggttaatgttagtaattttattaacgttagttttttgagatcgatttagagttggggttttaagagtagttttgggcgtttaggagttaagattttatagagggtgttttttatttttagtttagggaaagtgataaatttggagtgtttttgtttatggtttaattattgaatttaaatgaatgtattgataaatcgtatttagtgttatttatagggaaaagggagggaaaaaaaaaaaagaaagagagttaatcgcgtttaggtcggtcggttagggggaggatagatgggttattatttttgttattttttaggttttttgtattgattttttatttttagtaaaattaaggtttagttttttttcgtagtttcggagtcggttgggatgaagtaatttttgtaggtagattattaggtttattgtgatggttttagtagggaatttagtttaggttatagtagtttaggcgtttgtagaaggtttagatttttgggtgttaagttttttttttttgtattcgtttcggggttcggtggggtgggtagtgtgcgatttttagggttgatgaaagagaggaggaagaggttgagcggcggcgagtttgaatagttaattttgggaggggttgaggtggggaaggtttttattgttgttttataggtttcggagtaaggtttttatgattttattagtagttgggtaggtataggtttaggtgttgagtgtgttaggattttcgttgttttttgggtgggggcgagagggatttttatgggtttgtaattagattcgcgtttttttagttaattttttattaaataaatttatacgtatagcggattgggtatggtcgttattttcgggagtttttttgggaaagttttttaaggttttgttgagtttcgggaataggtttttatttgttcgggaatcgggttggtatttaataaataaattaaagttcggcgtcggaaggtagaattttgggattagagttttagttaagggttataagttttttaggaagttttttttttaaagagtggttgtgggacgttgggagtttttagggtggttagtttttaggtttttttaaagtttaggtggtatcgatgttttgtgttaaggtgagggttgtagagaggggtcggcggggaggagtttttatagtttattttggttattgattttatttttaagtattgaaataaagttttttttttatattttcggttagggagagagggcggaagttttaaatattcggggtgtatgggaaaggtttatatgtatagaagaattagataacggaagttgttggtggtggtgataggttttttaaaggggttttgagatttttgatatcggtagggaagttatatattgtattaggtttgggggtagggagaaggggtttttaaggacggggttgtttttttttgtggaagtgtttcgtattgtttgataagagtagtttggattagtcgtggtataataggaagttgggagaatacggtggtttaggaggttggttagggttggggagtggttaatttagagattttggttgtttaagtgggtttagggttttcggggtgaaagtttttgtggagtatagtggatttagtgttcggaggatagattttaggtttagataaggttttttttttttttttttgagatagagttttatttttgttgtttagattggagtgtagtagtataattttagtttattgtaatttttattttttaggtttaagtgatttttttgttttagtttttcgagtagttgttattataggtacgcgttattatgttcggattagttagtatttttagtagagatagggttttattatgttggttaggttggtttcgaatttttgattttaggtgatttgtttgttttggttttttgaagtgttgggattataggtatgagttattgcgttcggttaataaggttatttttgatatggaatgttggtttgattatagtgtttgatggtttttgtttgtaattatgttttcgttttttattaaagtagggtttttagggtagaagtcgtatttttttattttagagtgttttacgttattttttaggcgtatatagtgggttttttttatcgtagttgaattggttttattattattataatgatagtttataggggcgggggttagtgggaatataaagtggttaatgtaatagtgttttagttatttcgatatagaaatggttaggggatagaaggggtaagttgggagttagtagtaatttaggtttttagagacgagtattaaaaaaggcgagttatattataggttttttttgattatattttagtttaaaagagatttaaggagaaataagaattttatttttttaataaggattcgtatattagatgttaagtaaatattttttttttttttttgaaaaggagtttttggggttgtcgggggagttggttaaagagaatgatatttatggaaatatacgtggttttattaagttttaaggtaaggtggtaatgaatggaggaggaaaatttatagtattattagggaatggggtttttttttgttttttttttttttaacgggtttttttatgtgggatttaaattaaattttaattttattttgatttagtaggtgttgtttttatagtttcgaatagatttgttagaaaattattgtttaatttgttttcgggtggtatatttttttttaggaaaggaattataaatttattttagatgagtagagagttgttttttaaatttttgattaaaatatagtagattttatatgaaaaagtaaagagagaggggttagggatgaagtgtagtaggttggaggttgagttagtttttagagttattgggacggcgttttaggagtagatggtattgtttataaagtttttcgtttttttttgttttgaggtcggggattatttcgttggttgtatgatttagtttttggggtttttttagtatgaaaagattttttgaaagtaggttcgttagggagattttttagtttttgtttattgatatgtttttgtatggtcgatacgtagtatgttattgtagagaagtaaagtatacgtagattagtttcgttagtagtatttttttttttcgttttttttaggaacgttttgtatatatttaatatatttaggaatttagagttgcgttgtagtagtagttttttggattttagtgtcggcgtcgcggggagtttcggttacggtatttcgagtattgagattatttttagtttttagttagtcggttttcgggagtttagaggggtgataatttgagcggagtgattttagagaaagcggtggttaattcgaatttttttttggtttttttggaagttagggaaattttttgcgaaaaggaaatatgttttaagaagtttcgggtagtaggagaatttagttatttagtttagttggttaaatatttataaagagatagttgtgattatataaagttttatttttttattttgaggtcgaaaatttggttttcgcgtggagatcgagtttttcgttattttttttttggggatttcgttcggttttgtcggtttcgggtcggggtttagggatagcgtggttttcggtatcgttattatggttattagggttcgtttcgcggtcgcgttatttgagagttttcgagttagtggtgtaaggttgggaagaataaaggagtaggatttattttagtagcggaacgtcgggttgcgttggacgcgtcgagagtcgcggttcgtttatcgggttatatggtttagagtcgagtagaggattaaaggggttttgtggtcgcggaataaggagttttttagagcgcggggtagaggtagggagggatttcgattgtttgggaagggaggttcggtggggaattgttttaagggggtagggcgaggggagtaggaggagggggtaggtagagataggggcgtttagcggtaggttcggcgtagaagtaatttgaaggtacgggagggacgttaaggagttgttatacgttaaaggaaagtgatagggtttttgggaagagtgagggggagttgttaggaagaagagaggggaagaggtttttagggatttttggttatgtcgtttttgtttttgtttttgtgtttgttagaggcggtgttcgtgaggagttttttttttttagttaggttttgaaattgatttggatattttttttttttgtgttttgtttgatatttttgttttttaggtgtttttttatttatttgtttagatatcgttatagttgggtttttagggagtatggttagttattttagaaagttatttagatttgtagttagggttggaatatagttatttgggtttgttttttttattttaggtgtttgttggttgggattatggaagggagaaggagtaggagaggaggggtaggggatgggggcgtagtttattttgagtttttttttcgagagtttttggatttagatttgatttagtttttgtttttttagtttttttagtttttgggggatttggttagtgagttagtttttttttttttttttttttgtaggtttgggatgtgttgggatttagaggggtataagtaagggggtttttagaggagggagttgatattataggggttgggtttggacgttgggatttgttagatttattttagtgttacgatttttgaatttaagtgagttatttttagtaggggcgtggttatttttatattaggagagagcgtttgggagtgggttcgtttcgagggtttgttgggggttgggagggatttatttaaatggaaagaagtttttggtgatattttttgagggttaggggttgaattttggaagttacgtttttaggtagtttttacgggattttatgttgagtgttgattgggttttatatatttttattttttttatttcgtatttttatacgtggttgggggtgattgaagtttcggggtattcgttatattggttaaataggttagttacgtttagcggttttttagttagtagttattggtatttgattcgtcgttttttattttttatggttaattttttttttaaggttttttggttttacggttttttttatttttatagtgaacggtcgtggggagttgttgttattggttttcgggcgttaggttagagtcgggggagtgtttgggagaagattgtatgttcggagtttttgtttttatttgaatgggagggaggttggtggtagattagagatttgggttttgagttaaatattgaaatttaaggttttgggtttgttatttaatatttgtggaatttgattttttttatttataaaatgggtattattaatattagtcgttaaaattatagtaagatatatacgtttaggttaggaagtgcggttatttagaaaatatagttttttttttttttaagaagttaatttttttagtattgggagtgagaagagtttgttttttttattgtttgtagtttagtttagggtatttttattattggtttttaaagggtagttttagaaatcgttgataaaggatgttagaaggaatttttttttggttaggtgttagggttaatagaaagtttcgaggatgtagtttttattacgtttttgtttcgtgggttttttttttttcgtgggtagaattttttttttttggttttttttttcgaatttttttttttttgtttttggttttaatttgttttttagttttttggttttttaggttttttttagggtttaagattttgtttttttttaagtttagttttttttttttttttgtttttggatttttgagttgggaggttagtattttgggtgttttgttgaggtggtcgttttttttgtagtggttttttttgttgttattaaatgagggtttttagagtatagagaaggtattttcggtttggggttgtattttttatataaagtttttgttttttagtattttttaaagttttttatcgtttagtatatatttagtatttaggtagagtagttttagagttttttcggttggttttcggtttaattttttagtagaaacggtatatgggttatagacgtaattttatattttttagtatttataataaaaaatgtaagaataagttaggtatagtggtttacgtttgttatattagtattttgggaggttgaggtgggtagattatttgaggttaggagtttaaaattagtttggttaatatggtaaaattttgtttttattaaaaatataaaaattagttaggtatggtagtagttatttgtaattttagttatttgggaggttgaggtaggagaatcgtttaaatttgggaggtaaaggttgtagtgagtcgagatcgtgttattgtattttagtttgggtaatagtgtgagattttatatttaaaaaaaaaaagaaaagaaaagaaaaaggaaattattaaaaaatgtaagaataggtgatattaattttaatattatttatttaatagagtttaaaatattattaatttaatatgtaattaatgtaaaaatgatagatatttgatattttttttttttttttttgttaggattttgaaatttagagtgtattttatatatacggtatttttttatttggaattattatattttaggtgtttaaatggtttcgtgtagttagtggttattatgttggatagtgtagttcggagagttttaatttttttttttttttttggttgtcggggaatagagttttgttttgttatttaggttggagcgtaatggcgtgattttggtttattgtaattttcgttttttgagtttaagtaattttttcgttttagttttttaagtagttgggattataggcgtatattattatgttcggcggttattttttgtatttttagtagagatggggttttattatgttggttaggttggttttaaattatagattttaattgattcgttcgttttagttttttgaagtgttgagattatacgcgtgagttattacgtttattttcggatagttttaatttgattttaggataatattaggttattagagagttgttgatttggattatattatgatttgaattttttagattattttcggtattatgtttataagttatatttagaggataataggatatagtttggtgaaatatatagcggtattttttataagatattggtgaggttatagattttattattagtgttattcgtttggggatattttatttttagaaaatgtagagttttttttaagaaatgaatgtggttaggtgtgttggtttatatttgttattttagtattttgggaggttaaggcgagtatattgtttgaggttaggagtttaagattagtttgattaatatggtgaaatttagttattattaaaaatataaaaattcgttaggcgtggtagtgtgtgtttgtagttttagttatttaggaggttgaggtaggagaatcgtttgaattcgggaggaggaggttgcggtgagttgagattacgttattgtattttagtttgggcgatagagcgagatttcgttttaaaaaataaataaaaaaagaaatgaatgttttaggtatacgttaagtattttttagacgattttaaagatattaattattgtgattgacgacgatttttttttttttttgggtgtgtttgttttgtttttttagtttataggtgtttaggatttaaaggtagttcgttataggttatgggatttggttggtttaaaagggagagtgaggttattggaatttttttaggagtgagtttgaagtttggaatgttttttggtggagggttttgaagttaggaggcgatgtagacgtgggggttgagatattatttggggttatttgtaaagagggatatttaggtagtgattttaaggaaagagtaaggggaggagagggcggtatatttacgtttttttaatttttgttcgttcggaggtttacgtattttatacgtcggttttttcgtatggatatttttttaataagtaatttatcgtgtttatgtttatttattttaaagttatatagaattgtatttattaaaaatgaatttatggagatagaaagtattttggtggttgttaagggttggagagggcgaatggggagtgagttttttatggatacggggtttttttttggggtgatgaaaaagttttggcgttagatagtgttgatggttgtacgatattgtgaatgtatttagtgttattaatggtaaattttatgttttgtgtattttagtataataaaaaaatatatatttaaagtaatagaatttaacgtgtttttttttttttttgagttagtttgtttttttgttttatattttaaaattagaagggttttgagatatattataggtttttagggtaggttgaataattttttttttttaaattgtgttattttatgtggtaatagggattttgtagatgtaattgaagatgttgagatgaagagattatttaggtgggttttaaattataagcgttttttaagagggaggtaggttaggtgtgatggtttatggttgtaattttagtattttgggaggttgaggtaggtagattatttgaggttaggagtttaagattagtttggttaatatggtaaaattttgtttttattaaaaatataaaaattagttaggtgtagtagtatatgtttgtaattttagttattcgggaagttgaggtaggagaatcgtttgaatttaggaggcggaggttgtagtgagttaagattgtgttattgtattttagtttgggtgatttcgttttaaaaaaaaaaaagaggaaggtagagggagatttgattgtagagaaggaggaggttgtaggaggatggaggtagaggttggagggatgtagtcgtaagttaaggaattttagtagagttttttatttaaagttggaagaggtaggaatggattttgttaatattttgattttagttcggtgagattgatcggtttttgatttttagtattgtaaaggaaggagtttttgttgttttaagttattgagtttgtgataagtagttatagcggtaataggaagcgaatgtagtttttagtttattttttcgtttatagtaatataggcgtttttttgtgtagaattttgttaggtagttagtgagcgggataggattttttttcgtttttattcggggttttgtgttggattttttaaggttgttgtttttgagatagtgaattttttatatttatagagatttattttaaagttgagaaagtgttttttttaaggggcgttagaaagaaggttttaaggtgtttttgttatatgtttatttgtttgtgggtaatatttatagttttttttcgtgatttatttaatagaagggttataggggagggagtattattggttagtttattttatagtaaggttttattttggaagttataggggatagttgggatttttatttttaatttagttaattgggagaagagtttagaatagttttggaggttgatatttgttaggaagtgtggtgatatttacgtgttgttgaaatatatagtaatatagtagtagagaggaggggatgtggttttatagttttttttttatttatttagtacgtacgtatatatatatatacgtgcgtgtatatatgtattaatttttagtttttaggttttgtattttgtttttgttaagtttttcggttattattaagttaggttgtgagtatagagtttagtttttttgttaatttttttttaatttattttgggtaatattttaatgggatgtagtagatgttttttattaaatgttaagagtaatatttttttttattttttgtgagttggcggtcgcgtttttgtatgggggtgcggaggaaagggttggggagtaggaatgtggttttgagggttggtatgtatttgtagttgtgacgtttcgaggtagtttatatttttatttatagattaattttgagaaggggttgggagtatttatagtttttgttatttttgggttggtaggttggggaaattttgagtagttcgagtgaaggtcgtttttaggtaggtatggtgggatagaggggtttttgtatattttttgtgaggtagcgtagttgttgggttgttttagtatatttgggtgatatgttttttttttggtttttttttatttggtttgggagaacgtttaggatgttttaattttaaaaataagtaaattttttttttttgatttatttatttttttaaattgtgaattttttttttgtttgaatagtttaattttttaaagtaggtttatattacggtttttagttttttatcgtttatttattttttagttcgagttatttggtgttcgttcgttttattattaatttagtttttgaaaaaatttttatggttagtatttagttttattttatttgatttcgagggtagtgtttgatacgtattagttggttttttttttttttttttttttttcgtattttttagtgttggggtttagatagtttttaagggttttttcgttttttgatttagttttttggagtgattatattttcgttttagttttttagtttagttgtttttttatattttgttttaggttttttttttggaatattgtttgtttttagagatttaagtttttattttttatattttttttttcgatttttagtttttttattaaagttttattggttgttttttttcggtgttttaaattagtttttttttgtttagattttataaggttagtttttattttatgattgtttttttggattattgggattattttttattaatatttattttttatttcgtttttttttgtttatgtagggttttgttggaggatttttttcgttttattatttttttttttaaatagttttttaggtttttttgttaaagttgaaattttttttttgtattcgaggatttttgtaatttggttaatttatttttaagtttgaatttttatttttgtttaaggagtttacgttttttagttaggttttattgtttcgtaaattttatttaaaattttttttggtaaatgttattatttttaggaagtttttttgatattttttattatatgtgatttttatttttagagttagattttgatttggagattttgatttttatttatttttgttttttttgagttttttaggttgtaggttttagtttatgtttgtgggtttttgtagtaggagggtttatttttatttttttaagaagtgttcgttttatttttcgttaagttgtaattttttataagtaggtatttttaatatgtttttttatttttttttttttttttttttttttttgagacggagtttggttttgttgtttaggttggagtgtagtggcgcgattttagtttattgtaatttttattttttaggttttaagtgatttttttgttatagtttttttcgtagttgggattataagtatgcgtcgttacgttaagttaatttttttttgtatttttagtagagatagggttttattatgttggttaggttggttttaaatttttggtttgaagtgattcgtcgattttagttttttaaagtgttgggattataggcgtgagttattgtatttagtttaatatgtttttttatattttttttgaaaagttattattatattaatagtgtgttttataaattgataataatttaaaatgtgatttattattaaaagtgtgattttatttttaaataatattgttggttgtggtttgtagttagttttattattttcgtgtgatgattattttgtagattagtaatggttttaggtttatatttaatttaattattttgtttttttaattttatttttttttgagttaatattaagtgtgttttagagttgtaaatttatggttgatataaaattaggatttttaatatttaatataaagtaatcgggttttgtattggttttaatagtaattataaattacgtttgttttttgtattgggtatattgtatttagtttataatatgtgtttttgttttttttattttttttattaagatggtatataggtttaaatttgttttttgggagtaattgatttttttttggaagatgtgagtagtttttatattatatttaagaagatattgttataagattttatattttttattttagtttttaagggtttatttatttttttaaaaatttatttgttttgttataatatgtgtttttttttttttatttgtttttttaagatatagttttattttgttgtttagattggaatgtaatggtatgattttagtttattgtaattttcgtttcgtgggtttaagtaatttttttgttttagttttttaagtagttgggattataggtgtgtattattatattcggttaatttttgtatttttagtagagacggggttttattatgttggttaggttggttttgaattttcgattttaggtgatttatttgtttcggtttttcgaagtgtcgggattataggcgtgagttatcgtattcggtttataatatgtgtttttatttttttttttttttttattaagatagtatacgggttttaagtttttttttttttttttttttttttaagattagttggttgggtgtagtggtttatgtttgtaattttattattttgggaggtcgaggtaggtagattacgaggttaggagtttgagattagtttggttaatatagtgaaattttgtttttattaaaaatataaaaaattagttaggcgtggtggtgggtgtttgtaattttagttattcgggaggttgaggtaggggaatcgtttgaattcgggaggcggaggttagagtgagtcgagatcgtgttattgtattttagtttaggtaatagtgtaagattttgatttaaaaaaaataaaataagtgggaagaggggagatagtggaataaggagtttaatttgtaattgattgtgaataattaattgagataatttattattttcggattagttacgggttttattttttatttgtttttttgagttacgttttttagtgaaattttatacgtatgtgattaaatttgtttttttttttattaatttattttgagtgagtttaatttatagatttttaaatattgaatttaagagggtagaggaaatgtatttttttttcgttataaaaatattttatttttttattgtagtgtcgtttgttttatttatagtcggtaatttggatttcgttttttaaagtttatgaaagtaggatagattgtttgtaggatgttttcgttataaaaggagggttaggtttggtaggaggaaagaaacggaagtggtaaacgtttattttttgcgttagatagaggtattaggtgtttattgttttggggagtaaatatttttaaaaacggaaagaaaaatttttagttttattggggtgtaaaaagttatgatttttttcgtggttaaatggttgggtggtttgggagataagcggtagttattttgaagtttagtttatttgtttgtaaatggagggtaatgaaattatttgttgtatgggtgtttgataggttgttgtttaaattttttgtttttttttatggggttttggggaagattatatgagttagtaatataaaagtattttgaaaattatacgaagtgtttaagtatgggggcgttggttgattttaggtttgtttttataagttggtagaaaattttttagagagggttttgttttttttttcggggtaggggtcgtagtgttagatttgatggtattggtggttgtttaggttatttggtatgagattgttgttagttttagatttattttaagtttgggagggaagtaggtcggggtgggggttttgaaattttttatatttttggtagagatattagggtaggtaaaagtgttatttatggtaaattaagaagtttgtttgaattgggtttaaattagtttagtttagaatggaggttagttttattttttttttttagaattaggagtttagtatattagaggttgagaaaacgttggaatagtttttttatttgtttgtttagagatagggattttaagttatttttttttttagtttattttataaattttttgtgttagattttttttgtttaggagttataggttttatttgggagttatttagggttttaaggtttttattatttagttgtttattttattaggttaggtttgtaggtatggagattagtaggatgtggtttaaatttggttgtacgttgattagttgagtgattttgggtttattttttaatttttgggaggtaatgtttttttatttgtaaaaaggggaaagggtttagcgaggagagtgataagtaaaggagatggtatttgtgtagacggtattgtgcgggcgtttagcggatgattacgcgttatttttttgttttttttttttgtttttgtgggagcgtgggtagtagggagttaagaggaagggagtagttgttcgtttgggacgtaggtcgttttgaattggaagagaaaaaggaataagtagtagttgtttattgataagttttatgtatttgtgttttaaaattttaaaggtgtatttgaaagattttttgggtaaatttttttttatagatatacgaaagttaggtgtagtggtttacgtttgtaattttaatattttgggaggcgaaggtaggcggattatttgaagtcgggagttcgagattagtttggttaatttggtgaaattttatttttattaaaaatataaaaattcgtcgggcgtggtggtgggcgtttataattttagttatttaggaggttgaggtaggagattcgtttgaattcgagaggtggaggttgtagtgagttaagattgtgttattgtattttagtttaggtgacggagcgagattttattttaaataaaaataaatttaaaaaaaaggtatatgaaaaaggtaaaatgttatgagtgttttgtcgtaatgtgttagttataaatgggaattggaggattttttaagttatttttttttttattttttttttttttgtatatgtattaatagttttttgggtgttggtagtattaggggatttggggtgttttataggttttgtttgtttagattttagagttaaggaggagatataaaagttaaaatagggtggtaagtggaataaatggggattagatggggtaatttggtagtattcggtaaggttttttttaatgagtttttaaagaggtttagtttttaggggaaggaggcgttttaggtagcgggggtttgtagaggcgaaggtttagggcggggtttttagggaagtcgtttaggatgttcgaaaggaggggagtaatttacgagtttggtgatagggtcggttataaagtgttatgaagtattaattaggttgtttattagtttttaggatagaaagattatagtagttaaggtgtggggatttgtttatttgatttttatttagtttagaaaatgattgttttagggttataggtaatagtttaagttttgtaagttgttggttatagggtgtagttgcggtaaggtggggacgtttattagttaagttttttaggatttttgggttgtcggatatgtttgtaggacgttacgggggtaggttagattaggggtatttttatttttttttttaggttttagtttttaggttagagtgttttttggtttttggggtttttagggttgtagatagatagggagaggtttgtgttatggtgggttatttggtttttgtaggaagtggttagaggttttagtatttggatatagtagttatttttttaatttttgttaatgttgttgttgttcggggtttattttttttaatttttttttttaattagggaggaaagtattttggagtaggaattgggttatttagtttgatattttagtatgattttgtatgattttgggttagttatttaatttttttgggtttttatttttttatttgtaaattaggtagataattttttaaagttttttttagttatagaattttaagtgttaaaataaaaaaaatttataaaaaggaaatatgtgtttagtttatattttcgtttttatttgttaaaaggggaaatggatttgttacggggttttttttttttaaatagatatgggagattttttttatgattgtagaattggagtagtttagaggagtttagaattttttagagtttgagatttataggggaatttattttaattttttcgggatagaagtattgttgtttaatggtatttaatttttattattgttgtagtaaatgattatatatttgtgatgttaaataatatagattagttttatattttattttattaggttatagggaaggtgtttatagggttgcgtattttttcgaggttgtaggggagattgcgtttttttgtattttttgtttatttgtattttttggtttgtggttttttttttttttttaagttttttttattgtattttttagatggtttattgcgtttttaaaaatttttgtgatgatagcgggttcgtgtggattatttaggattatttttttattttaagattagttgattagtgattttagttggttttgttatgttatttaacgtagttttaggtgttggggattaggatgtgtttaattttgggagttattattttgttaattttaagatataggttttggagggagatgaagggtaggattataggtttaggaggttgtttgcgtgggttcgaattttggttttattattaaggaattgggggagtatattatttgtaaaatgggggtcggcggggaattagttttttggttgttagcgtagagtgaggtagtgtgtgtagtgtttggagtagtttcgtgagtatttgtttttttttcgttaaatttataagaattgatttcggtttaacggtttttttaaatttttagtttttttcggttataaggttaggagtatttttttgtagggttatttaagtttttagtttttttgaaagtttcggtttatacgatgttggaagtagatgtgtcgtgggttgtttatttatgtatggttatcggagaggttcggatgatgtcgtttttaatgggtgtatagtgtagggtagggttaggtattaataattagttatagttattagcgtaagtaaggggtttttattgttatttttggtttggggttagggagaagtttcgggaggtatttgatttttttatagggagtggggttataggagaatgtattcgaaaggggttggggggtagtagaaagttttttttagaaattttatttttggttcgtgatagatgatttttttaggttattattggggtttatttgggtttttgtagtatggagtttggttattttagaaggatgattgggtaggttagggttattggcgatggtgacggtaggtttttttgaggtttttttattagaagtattaggaggttagagtagtcgataagtttttatttggtttttgaggggtagaaggttttgagtagttttttgatttttcgaggtttttttattttattgagagattttcgagagtattgagagttattttttggttttttcgtgagagagttggttatataaaggtagttatatatttagtaagatgaatttataatttttgagtttaggtttatttcggtttttttatagggagtttttgggggcgtggggtgggggtgtagaagggaggggtcggtgttttatttttgggaattaggttatgagttttggatttaggttaaattatagaggttttatttttttttaggttttttgttttttaattatttttgtatagggtatttttttttttttcgtagggttttattggggtggggtgaggaggagttatagaattatagtagttgttatacgggggtgttaaggtagggatgttgatgttaatcgaatgggtacgggaaggtagagtaggaggtcggcgttttgggtttggttaggttgtgtgattttagggaatttattttatttttttcggtttttagttttttttattgtaaatcgagggagtgaggttaggtgatttgtataatcgcgtgaatttgtgttttgtattttttatttattattttaaataatgtttttaaattttagttttttaatgtttcggtatttttttgtttgagaaatatttacggttgttttttatgttgtgttttaaatataggtattttggtttttttttgggtgtttttattagggttagaatgggtagtttattttgtaggaatttttaaggatttttagttatttttaggatgggggttggttgttcggaagcggtttttgtttattttcgtcgtagtttttattacgaggttagtgtagtaaaataggaggtgtaggtggtcggggttaggggttaggttattttttttagcggggtaggagaggggcgagaaaagttggatattgattattttaggttgagggtttgcgtggaggagggggtttatggtaaaggaagtgggaggatgggaaggagtttttgttggatatttttatttcgttggttttagtttcgttttcgttttatttgcggggagaaagtgaggttttttgttttgttaaattttagtaatgaattttatatttattttattttttgtttattggaaattttttttttattttttggattcgttttgaatagttgggttgtagaagtcggtggaatgaaatatgtagggtggtttagaggggattgtgtcgaatagcgttgtgttttcgtttatttttttttttgaagataaggtttttttgtttttgttttttttttgggaaagttggagagggggttgaggaaatgggatttattattaattttttcgtgtacgttggtttttagtaggtatttttatattttttaattaggttcgtagggtggaaaggtagtcgtcgagtttaatttaatttttatttagtcgtggaagttagtgtggatggtaaagtatttatgtataaatatatatacgaggttgaggttaagagaatacgcgtttagtttttttttggttttttagtaacgtttttatgttttagttttgttttaagttttaaacggtgtaaggtttttttaggtggaggaatggaagtttttaagaagttcgtgttttagggattatatagaggtagggtttaggagtaaaggtttttagatttcgtagtgcggcgttggtaagtttgcgttgttgtatttatattgttttgggatgaaggcgatatgttgattttttttaggtggttgtaggatagttaggaggaggtgagatgttagttaaaggtagttatagataatagtattacggattattagaaacgttattttcgtgttaaagcgttcgttttttttagttgttttattttgtgttaatattttttgggagtgatatgtgtgagattgggttgtgttgatgagtgattattggtatttttagattatattaaggaggggttattttgttgttaattaggtgtagggtaggcggtattggggtacgacgattcgttcggtatggttgttttatttttttttttgtttgagtataggttggtaggtttagaggagaggaggaaatagagttattatggggggcgtgtttaggggtgagttattttaagaagttatagaattagggtatgggagatattgtttagttttgttattaatttgtcgtgcgaagttggttaagttattgtatttttttgggttttaggttttgtaattagagggttggtcgaagaggtaaatgatagtggttagggatgggggtattgaagttagatttttcgtattcggattttttttttgttatgtttagagggaggtttgggtaggttatttaatatttttgggttgtgggttttttatcggtgaaatgggaataataatagaattaattttatagtgttgttgggaggattaaaggggatatttattttaggtaaagagtttttaagatagttcggggtttttaggaagtttttgttattattatcggatattattatttttgttacggttgttagggtttcgtttagtatcggtagtttgatgtcggtagaggaagggtgaggtttttgtttttttgtagcgttttttttttttttttttttttagttatggtaataatagttgaagtttatttttagttttagcgattggttatttttttgaattaaggattgaaggttttaggtttgttatttaaggtttaggtgtaagaggggtgagttatcggtttttgtttttattatatttaggtttttatacgtttttttaaataggtttttgttttacgtgtaagagaagatgttaatttttacgtttggggcgggggtgtttataaatgttttggacgtgagttttgacgggggttatggtgtaggttttgttagggtatttttaattataggggattatttgtagtttatagagggttttttgtaggttaatgggattttgttattttggttgttattttgtttagttatttggtaaggaaaataggttgtagatttagaggtagtacgggtttatatgttagcgagataatataataagggaaggatgtgtaggacgagggagttatggagattttatcgtagttttagttatttattagtagattttgtgcggacgtcgggtaggttattttattaatttttaggatgtttttgtaggttttgcgggtggatagggtgaacggaggtataaggagggtaagtttgataggggttggggttgggtttggagttagaattttagttagttttgttatcgtattttagggtatttttcgtagatagtaggttaaagtaaggttgtttagattaaaggggaaggggttttgttttttttattaagggttttttggagattttaatatagatttttagtttatagatattaaatttagggtttttgagaagtgagaaatgtgaaaaacgtatagaatagttgtagtttagcgtttttaatacgttagatttatataggtatatatagcgtttttgtagaggttagaaagttttgtgttgggaagtttttcgatcgggggaggttttatagtaagtttttttttttgtttatttattaacgggcggaaggttttaattaggattatatgggaagggttagcgggaggggtagagagggaaaatgaataggtaatattaagtgtttggggcggggggcgtaggggatatttaggaggggagggtaggggtgtattttttatttaatttatagggaacgggggttcgggaggtgtaggagaaggtttcggtatttttatttttttttttttgtagatttatttatagtttgtttacgggtagttagatttagttataggttagacgttcgttttagttttatttttttggtttattgaaagtaagttaggatagtgagggggacgatgttgttattttcggtatggttatgttgggtttcggggtgggtgggaacgtggttggggcgttattttttttggtcgttataggtataaaagttttttcgtgttttagtgttatatgtgggttttttttttgttgttttaataggacggatatttaagtagattttgttggtcggggggggttttcgtatttagttttattttgatttagcgaattttttttttgttttttggggtaggagttattaggtcgggttttaggtaatggttagtgaaggggttgtatggaggggttttttaggtttataggaagggaggttttttttttttgtaacgtggttgtagtattttgtgatcgagagggatattacggttggagatggtgggatggaggattttttatagtattttcgatgtttagaatattttattttgtataaaaaagttttaaatttttttgagggttgaagttatttagagttggggtttttgttttttaggttaaaagtattttgtcggagtagttgagagtatagcgggaggggaggggtaggagggaatagtttcgttacggcgataggggattttttgattttaagagggtttgtagatattattatttatttttagttttgaattgttttttgttaaggggttagaaatttttgggagggggattatagggggtttcgtttatgagaatagtgattgtggttaggttatagtttataagttagtaattttgtttagtcgtcgcggtggtttttttttgatggtttttagaaaaagcgttttattttttgttattagtgttttgaaatttaagaatattttttaaatagtaattgtagtaaaagttaatgttgcgtgagtgtcgtaggtattatttttagggttttatatatttttcgtttagtttttataaaaattttattttattttttttttcgttttttttttttaatagtttagaaaacgagtacggaagggttaagttggtttgaggaggggttggtggaatagtttgagggtttagtttttaagaattttatattgtaaagggaatttttgggttagggagtagggtatagtttttatttttttattttcgtttttagtattaggtttgatatagacggggtttcggttatgaataaatgaataagtgaatgagagtttgttgagggaagaaggtgatagggataagggagaaataaagtagttaatgtcgtcgtgatgatgacgatgttaacggtagtattgatatgtgggtttttgttatgttaggatcgttttaagtattttgttttatgaatatttttgttttttattatgtttcgagtggatatttttattagtttattttatagaggggaatatagttgagcgtattggttaaggttatgttgttaggaaaggttagagtttaggtagtatgtggttttttagtcgggttttggtttatacggttttataggtagttttatgaaatacgtagagagagtatgtgaggggtttttttgttgttttttatttttagttggggtttattttttgttgaaatttttttaatttgtttttaagtttcgttagttacgaaatatttttttgaatatttagtattatttttttatggttatttggttttatttttttatagggtaagttttgggcgaaaagtagaaaggatgaaaatttttgagagaggtgataacgtggtaatttttttttttttttttttttttttgagatagtattttattttcgttgtttaggttggaatgtagtggtacgattttggtttattgtaatttttatttttcgggtttaagttatttttttgttttagttttttgaggagttgggagtataggtatgtgttattatattaggttaatttttgtgtttttttgtagagatggagtttcgttatgttgtttaggttggttttaaattcgtgggtttaagtaatttgtttgttttagttttttgggattatagacgtgaattatcgtgtttggttgaggtggtttttatataaagtagagaaaattatttttagtttaaaataaattaataagtattgagtgtttatgtagaaaaagattagaaggaaacgtgaatatgttaatagtgtttgtttggaggacgtaattattattgattattttttttatattttttaatttaattattttgttataagtaggtgtgatttttaaaattataaaagataaacgttggttttttgtttgtgttttgttttttgagatagggttttattttgttatttaggagttggagtatagtggtgtggttatagtttattgtagttttaaatttttaatttaagtaatttttttatttgagttttttgaggagttgggattataggtaagcgttattatttttagtatttttgttgtttagattggtttcgaacgtttggttttaagcgatttttttatcgtagttttttaaagttgggattataggcgtgagttattacgtttagtaaagattgttttttaattaggaagatagatgttttttagtattttttgtttttttttttttttttttttttgatacggagtattgttttgttgtttaggttggagtgtagtagtatagtttcggtttattgtaatttttgtttttcgggtttaagagatttttttgttttagtttttagagtagttgggattataagcgtgtattattatatttggttaatttttgtatttttagtagagatggggtttcgttatgttgattagtttggttttgaatttttgattttaagggatttattcgttttggttttttaaagtgttgggattatatgcgtgagttattattttcggtttgttttttagtatttttaatttttgttttttggtattatttggttaagtagatgaaaagttttagtgagttgttagtcggtattaggttggggttttttttaggtagttttaagtggttaggatttggttttttttttagagttgggtttagaaattaagatcgggaatgcgtgatggttgttttgcgggtttttgttatgaggttatttttttggttttagtgatcggtcgttggttgtagggagtatgtgggtttagttagggtttgtgttaatatggttttgttttatttacggtttagtgggtttttttatttttcgttgtatgataattttaggaaaaatgttaggagggagggagtcgttgggggtgtgataggagagattttttagggatagatttgtaaaaattgttttaaagttttttttaaggatttttaaggtttttattgttttttattgataggttacggttcgggtagagaaagttggggatggagttggcggggggagggtggttagtattcgtaaggtaaggagatgagttgggagaataggggttgggagggtagttttaggttagtttttgtttttagaattattgttttttttttttggttataaagtgaggttggttagatataggtttattttataggttgggaggttgggcgtgaaagtattgtgtttgtatggggtattttatggtgaatattattagagttaatttttagggtttgttgttttatagggaagttagtgtaaggcgtttatggaatttagaagtatttaaaggatttgatagttatgagttgggaggatttagttttgtagtaggagaaagagaggtagagagataggtttcgtaatatttgttttattcgttgtgttgttttgagtatagtttatttttttgtggtttcgagttttagttttgaggtttttaagattttttgggttttcgtagtttaggatgtttatttgaaaattaggtttagttagtagggtttttttcgttagtttattattggttagtttttgtttagtattttttagtttattatttttatttgtgtaaattttatattagtattttaagtttttttttttttaggaaggagattgtttttagatgtgttttttgttttttttcgattaaagtttagaaaataggaattagttttgcgttttttttttttatcgaattgttggtttttttggatgttttttttgattttttgttaatatttttataatataattagtttttagtttttttttaaatgtaatcggcgagtacgttgtagtttaggcggacggtgatgtttttattttgtaatttgcgagagttagtatattttttagttaggtgggttgtaggagttagtcgtggcgagggtaggaggtttgcgtgttgacggtatcggtattattaaaattacggttagattaaggttacggttaacgagtttttttatttgtaattttttttttattaaggtggttttagttttagtttcggttttagttttggttttggttttaggagttgtagatatatttttaagtttttattttaggagtttggttttatatatatcggaggatacggagttggggtataaatagttaagaataggtatatttgtaattaggagtagggggcggagggttgttgagatgtttttatttttatcggttgttttttttgacggtttattatttattatatattgattgtataattagggttgtgatatgtttgttttttatattatattattaaatttttaaatttgtttttaatttatatacgatgaggtaaatttagagttaataatttgtttattagtttttgaatttatgggtggttttaatttttttttttttagtttttttgggtttatatgagtattgaggtataagggaattttattagttgggaagtgtgttttttttttgttgattttatagtttttttagtttgtgtttgaagttgttaatatttttttatttagtattgttttttgtagtttgagttgtcgttgtgtgatttagggttagtgttttaatttttttggattatatttgtaagatgaggatgtcgtcgtatagtttattttaaatggttattaagttgtttgtatagttaatatttgtcgagtttgtgatacgattagttttgttttaatttcgaatgtggtatttttatttagtttgggggtggaattgttagtttttttttttttggataaggaagttgaaaggttttagaaggtattaaggttagttgatttgttagtaggtatagtgtttatttgttatttatagtttttttttgatcgtttcgtttgtttttttagttgagattttgtgtgtatttgaatattttgttaatggttgaatttgtattagggttattgtgttagttgggtttgttaggttatcgttttcgagttttgtttaaggtagggttagtgtttatattttgtttttttgttagtgttttatttaaggttttggaaaggttttggagttagagattcggttaaattttggtaatgttttatatttgttgtgtgattatgggttagcgatttagtttttttgtgtttttcgggttgttgtgagggttataggagatgtatagagggttttgagtttggtggttggtatgttgtaaaggttagttacgtggtgtaaggatggtattgatgataataaatgaatcgaacgaaaattaggttaattgggtttggggaggggcgttggttaaatagattcgagtggattaggattttgtatatgatgagtaagcgggaatagttttaaatagtaagtcgggtaggtttaggatgatttagttttgggtgttgtttagggttttttttcggtttttttgtcggtttggtttttttttgttttagtttgattgtttttatgggttttaataagtttttgattaggattgaggtagaatagatagggtttaagattttgtaggtaggtatagagtgtggatggtaaaaggagatgttttaggttttttgtcgttttttttttttcgaaggttgataatgttaatttatagaagaagttgtttttttcggtttcggattttattttaatatagtgtatgaggtagttgtgtttaaggggtgtgattatttttgtagatggaatttatttattgtgtttagtttattgttagagttcggaggacgggggaagtgaggtggggtattttttatagtgaagggaaaatttagtttagttatttttttttgtgttgtttttggaatttattttgttatggttttattttaatttagttttttaaagttttagagagttttgtttttttttttgtattttatttcgtttatttgtgttgggttagttttttagaagtttcgttttttgttatttttagggtattaaggttggttggtgggtttagggatttttattttttgatttagttttagtggtttattttatatttatcggtatttataggtgtgttttttattttcggtttttgtataggcggttttatattttgggagtttagttttttttaaggatttacgttagagtatagggatttttgtttttgatttttttttagttttaattacgagtagtttatgttatagtaattttttagttgtttgtagttgtttgttaagttatgataatggtttttgttttttaatttaatgtttgtatatagataaatcgttatattttaagtagattagatattattttttttaggaagttttttttgattgttttagttggatagaggttttttttttttgtgtttttttaatgtttaataggtatttattgagtattcgtgatatgtaaggtatttataatataagttagtgttttttgtttttttagagggtatatgaataaataaacggtaagattttttaatatttatttatgttttatagaaagttatttataggtatgggagggttgttttaattgcgggtgatagggaggtttttttaagatggtagcgttttagtaagatttgaatgaggcggttaggaggtttagggagggattttttaggagggaataagtgaatattttttcgtgaggatgagtttttatgttttaggagtagttaggttaggggatcggtgtagtgaataggggttgaggggagtggttaggtgacgtagggttttataggtcgttttacgatgagttagcgttttaagtatagtagatatttagggaaggtttaggttggggagtgatttgaatagattttttatttaggagtttatcggggtttttgggtttacgttgttgcgttattgtatgttttcgggggttcgggggggtattttttatattattattataggtagtatttttgggggaggtgtgttgtgtaggggattcgttggttattttgtcgggtaaattataggggattgtgtaggataggcggttagtttaggagggataattatttaagtaggggttagagggtattcggattcgggaggagtgtttaattttttaggtttaggtaattagaggtggggggcggggtgttgttttttgatatgggaggtttgggggtttggttgtattttttggtgtggaggtgttgggaggtgtggaggtttttttttgaggttgggattttttggttattttgatttattgtttcgattttattttttagtttgagggtatggtttgaatttatagtcgtatatatttttttttgtatagggttttgcggggtcggtatagtagttttttttttatagattaggatgtttagttttaggagggttgggattgtttaagatcgtataattagggttagatatagttgggttaattttgtgatttttggttttacgtatagattttaagtatataggtaaaattttgttggttgggagggttggggggtagatgagcggggggtagtttttttttagttttttaatatgttaggtttttgggtgggagggggtataaagattttattttttttaagagatagagaaagaggtagtggagggtttttttttggttgaggttttaggttttgagtggtgaatgtaattttatttggaggttggaagttaggcggttttgggggtgtgcgaggttcgttagtttagttgtagttttttttatgtaagggaattttttttaggtagcgtttttatgattagagagggggttaggaagaggtgagggttgtatttagagtgatattcgggtgggttttattttggggatacggttatatttttttttcggatttttgaagtttttaggtgcgggttaagggtttttagttgtaggtaggagagggttttatagttatagatttggggagtttagtttgtaaagtttagaggttttcggaggtcgttggttcggttttttgtgtagttgggtttttttgggaggttttttttcggtatttttagtttttagttcgtacgattttttatagttgggtttatttttttaggttcgggttatatggtgtaggttagtggggttttgggggagggtagggcgttaggaatagtttcgggggtggggggattggagtagagtttattttggtcgtttgtttattttgtatgaaggacgttagatttttatatgtggttattcgatttcgtttaattatgcgtaagttttggttatttttattttattgatgggaattaaattggttaaggagaagtttagaatttgagtagagtaggggtttaagttttttaggagttttaggtattttttagttttttttttcgagtattgagtttatatatttagtgttcggatgtttatttatttgggggttcggcgatcgttagttagtatggtttataaagggtttttgtgtaataggttttatttgatttttttaaaaatttttcgaggtaggataatgttatttaatttattttatagataaagtaattgagttataaaatggtttgttaaaagatatagaggtagaaagattaatagtaaagagtttttttgtgattttgattagtaaggtttttagaaaaaagtaagggatttcgaggtttttataggaatagagttttggaggagaataagagtttagttttatgttatttttaaggggtattttgaaggttaaggtattgggtttaagtaggttggattgtgttttttgtattttttttattttttgaagtttttttttttttatttaggtgggtcgtggaggtgtttataatatataatggaatagttggtaggttattgggttttttattgagttaaggggttcgattagaggtttaaatagtggtatagaaattatgagtttcgttgtaaattagtttaggttttggagttaagtagttttgtgtttatagttagggttagtcgtttttagttgtgtggtttgaggttagttttttaatttttttgtgtttcggtgttttttttgtagtagtaataggaatcgttttttacggcgatagtgtagatatattttatgaagcgtataaagtttcgagtttagcgtttggagtacgttaggacgtagtaagtggttatttatgatttatgaaatattaataaggtgaggggtggaatgatagtttttttgcgttgtttttaaaatggaaataaatttgtttagcgtttaaagtagtagaaagtgagttaaggataggtttttagcgatatgttttggtagagtgttttttgttggttttaggtagggtttagggcgggcggttattttttagatgagtttatcgttggtatttgtttttagagtatatgtttggattttttagatttttttttttttttttttgatttttttttattttgtaatttttattttttgttatttttttatttattttttttttttatttttgtttaaaaataaataatggaggttaaatgtgttagttggttttttggaaaggtttttttgtagtaggaacgcgacgggggtagtggaggattgtttagcgtaagttacgtgattttcgcgcggagtcggggaaggggaggcgttgagatcgagggtgttaggatcgaggtattgagatggggttattggataatggttagggttagttttcgtttttattttaataggggtttttatatttaggggttatatttttaaagttttttggataagagagataaattttattatagggttagaaacgttgtttttaggtcgttatttgggtgggggtgagagatgtttcgtcggtttttaaatatttattttgtggataaaattattaaggggaatttaatgtttttatagtagtttggttaagatataggtattaggtcgggcgtagtggtttacgtttgtagttttagtattttgggaggttgaggcgggcggatcgtttgaggttaggagttcgagattagtttggttaatatggtgaaattttatttttattaaaaatataaaaattagttaggtgtggtggtgtgagtttgtagttttagttatttaggaggttgagataggagaattgtttgaattttggaggtggaggttgttatgagtggatattatattattgtattttagtttggatgatagagcgagtaagatagttttaagaaaaaaaaagatgtaggtattgttttagggtttataagtataatttgatttttgatgttggtatttaattttgatgtagattttagtaggaaaagggagacgaattagaaggttgtggggacgaggggtttatagtagtgtttattagatttgttttggtaggtataagtgttttttggaggttgttagataagtagagggtttattttagagattttggttttggagggttgggttagggtttaggaagttgtatttcggtagggaatttagagttattttgagttttattttggaagtaagagttagggggtagaatagaatcggaattaaaagtttttgtgggtttagttttatggggatgggttcggttttatggggatggatttttgtattattcgaggtgattattagttcggtttttcgggattagttttgagtgttttttggggaaagcgggatttgtagaggatggttttttaggattcgtttgattatttatttttagttcgtttttattttagtttttttgatttttattttttatttagaattttggagatttggttttggaggtttagagattagaaatgaggggagataaggggagaagtttttttttttattcgttggttacgttaatgggttgattttttaggaagttatattagttattgttattgttttggtcgtttcgtttggtttcgaggttgggtgagtaagtatttcgttttgtttgtttttttatttgagttttttgttgatgttacgagaggtttgattacgcgtttaggaggtataggatagagtttagagttgtttaagaatatataaggttgaggttcgggttttgtatttgggaagggttaggaagggttaaaggaaaattttagttgagtataatggtttatgtttggaattttagtattttggtaggttaaggtaggaggattatttaagtttaggagttggagtttagtttgggaaatatagtaagattttatttttataaaaaaaaattaaaattaaaaaattaattaggtatggtggtatatatttgtagttttagttatttggtaggttgagatgggaggattgttgagtttaggaggtcgagattatagtgagcgggatattgggttattgaattttagtttgggcgatagagagagatcgttttaaaaaaaatttttatattttatggagtttagtagaattttcggttagggtgtttcgattgtgaaatgagcgtggtagttgttaattttcgagggtgaagatttatttattagtaatttgtattttggtacggtgagaggaagtgtttggggaaagacgtcggtcgaggtagagagtttagtttaatttatcgtggaggagttattttagttttaaagagaaagattaataaattttaggtgaatggtttaaaagttatttttgtatacgtagagggtgtattttgggatatgtggatatttttttttaggataggaagtaaaattagtaggtagagacgtgagtttttttgtttttgtcggagttaatttggagtttttatttcggtttttagggaagtatagatttttatttttatcgtagttaaaagattttttgttgatttttttagtagtatttagtttagttttgtggggagaggcggtagggggaggagatagagaaagatgagtttttggtagttgtgattggggggagagaaatgcggttttaatttgtttttgtttattttatagacgggcggtgttttattttaaaatttagggtagttgagggattgaaggaagagggggatattttttaattggggtttttttttattttattttatggcgttttatataggaaagagttggaaggtttcgggtttttggtatttagttaaagttttaggtaggggtttagatattgggttgtgttattattttaggtagttcgggagttagcgacggtagagttttatttttatttcgattattgtatagtatttcgtttttaggatagtttagtagttaggttgttttagggtttaaatttagatatttaattgtgggggttttaggtaagtggttgaagttttttgcgttttgattttttaatttggaaaatgggatgatgaaagtaattgttgggtagggtaaggggtaagtgaaagttagcgtttgagagtgatgtggttaggatcgttgttgtgattatatattgagttttttttttttatttgagataagggttttattgattgttgttagaaagatttagatttagaaggattaggaaagtcgttttatttataattttagagggaaggggaggttttcgtgttagttggttgttgtaggggagagggtgggagatagatgggggatagaggagtaggggtagtaggaggaacggtcggtagggaagttcgtttgagatttaaaggattgtttattaggaggatagtttaggttttttttattgagaaagatttttttggatagttgggttgaggatttttaggttttttgggtggagtagaattagttattattgaagttatataggtttgtaagtataagtgggggattgtttaggtatttttgttttataggggttaggtattaaggttagggtggttagaggatatgacgtagtttagtaggggtttcgtagaattattagttaagaagatatatgtagaagtacgtaagtgtttcgaggaggtaaattttttgttggattgaatatggggagttgagtttttaattattgagtcgggttgttcggttcgtttttttttttttgaatagaaggtttttagatagagtagttaggtaatagtatggttaagtaggggtttgtattttagttttgttttgtagtttgattaggttgtcgtttttttaggagatacgggattggttagggtttttttaggttgttataggaataaggtagggttgtgattttttttatggtttaggtatttgggggagggattatgagttttagtttaggggatagataggaaacggatagttcgttttttttttaattacggagttggttttttttttatcgtattttttttagttatgttttttattagaagattatcgtatttaatgggtggttttgtagcgatatttagtttaatgaagttatttggtgggggttttgggggatgtagttttttgaaatatatacgggtagtgggtgagtcggaggttgcgtggggttttgttttttggggatggttaggaggtgttttaattatttgtaattcgagtttatagtgatcgggatttgttgtttttttattttagtttttttttattagtattcgttaagcgttagttagtaggtgtcggtacggtttaaggtaggtttgtagttagattagtatcgggggagggatcgggagagagatttttagagtggaagttatagttttttttttttttaggttgggtaatagattattatttttagttagttttggggaagggggaggggttagttgggtcgtaggtatagcgttggggttttttgaggtggttgttgttgattacggttttttttttttttgggttgggtaatagattattattttcggtttattttagggaagcgggaggggttagttggggtataggtatagcgtcggggtttttgcggcggttgttgttgattacgggtttgttattttttttttagttgggttgttatttcggttttgaaagcgttttttttagtttttaattcgtgtttaggaggtagtcgatattttaagcgttgttatagtaggaggttgggtttgtaagtgtgattcgtttggggaggggtagagggaaagattattttcgtttaaatagcggtttttttttttttttcgggggtttttatagggtttttagtttttttttggttaagaggtaaggagaggtaggaaagttttaggaatatcggtagagaagagatagggtaggttgttagaggaagtaggttgtagggtgtttaaggttttaggttgggttttgggaggttagggtatgggtaattaggaggtttaggtagggaaatttgtttcgtagggattttgggagataggggagaggggatatgatagtcgttttttgttgttttttggttgtggtttttaggggttttagtttagattagaagtattttatgtatcgggtttcggtttagtttggaagtacggtttatagatttatatgattatttgggtagtgatttttaaaaggtttttcgttattagttggggagttttcgaggggagggtggttttgtagagtatttggagatattaatgggtcgtgaggaaaggaggaggcgtggatatttttacggttttaagagaaaattaaggtagagttggaggttgggcgtggcggtttatatttgtaattttagtattttgggaagtcgaggtgggtagattatttgaggttaggagtttaagattagtttggttaatatggtgaaaatcggtttttgttaaaaatataaaaattagtttgttatggtgatacgcgtttgtagttttagttatttaggaggttgaggtaggagaattgtttgaatttaggaggtggagattgtagtgagttaagatggtattattgtattttagtttgggtaatagagtaaaattttattttaagaaaaaaaaagagtagagttggaggttaggcggtttttagagtttgataaggaggtcgtggggttgggttgttttttcggttatttgaggggtagggattggtttagtttgagttttagatttataagaggttgaatcggagcgggatttcgagatgaggtagggttattttgtttatatttgtgtttaggttttaatagttattttttttaggaatttagtttgatggttttttaggttgagaggttgttaaggggttgtaaggtgtcgtaacgtgtgagtcggtgggttttgatgtgtgatagttcggggtattttttttatcgttagggaataggaatgaggagttttttatttttagtgtttggtaggtaggaggtcgttattggattgtgtgtttaggtgttattagatttcgagggtttacggatacggtatatgatttttaatgattaacgtttgtgtagtaggtgttgaggtgttttaatttcgagtaaggttgggtttttggaatttttttttcggtaggaggatttgtagttgaggaatttttaagaaattttttggtagtaaataaagtatggggttggacggtggatttatgagtgtttttatatgaatgcggatatagatagaaaagacggtaaatatttgtgaataaaaggaatggtttttgcgtattgaatttttatttatcggtttttgtttggtataaagtttttaggaattttttaatagttttagttagaaacgtgtttttgtttggttatgtggaaaattttatatatattaagatatatgatgtttttggttttttttacgaatgttttatgttttttgggtttatgatttggaatttgtagatttttgttgtttttgttttagagttataaggattttggatgtaggaaatattttttatgtgtaagggttttttttttttttgttagggtttatcggtttttttttgtttataggtgttatttaaatttttgtatttgtggttttttttttttaattatttcgtgtaattcgttaatagtttttttatttttagagtttggttgttggagatatataaggtatatagaattcgtgaaatgatattgagtatttattaggtatttattgtgtgtttcgtttggtaataataagtaaaattataatgttttgggtatatgagtatatttttttatgtttatttttttagtaatttaatgagatggttttataaatggggaaattgaggatagggaggttagattggtttaaagttataggttaggaggggtagggttaaaatttaaatttagatagtttggtattaaattttagttttttatacgaaaggtattttgtaatttttcgagaaggttgggattattatttttattgtatagatgaggaaattaagatgttaaatggttagatagttttggagttaggaggtgggtttagtggtttatgggagtatatggaatggagtttatgggaggttcgaggttgggatttcgtattttattttggtttaagggatgaggtgattgggagtgttagagatattttgggattggttatttaggtgttttgtatttagttttagcgttgagtgggcgagggtggataatttgttatttagtagggttgttgttcgtatttcggtggttttttaaagtttggttaagtaaagtaagattgttttcggattagagtgatttttaagttatataagtatttagttatgtttcggaggatgtaggattgggaaggttttttttttatcgtatttttatttagtttttttatggggtagttggttttaggtatagattagacgtttttttttttgtttgttgtcggtatgtttttggttttattgttgttttagggaggggtttaagagtttttcggtttcgttatttattatatttcgtttagagggtcgggggtttagtattaacgttaagtatttagtagtaaaattacgggttggaaagagttatagtgttgttttgatttggttttattttatatcgggtgtcgtttttattagtttttttttgtttttggttttattttttaggtattataagttttgtaggtttaaagttaaatttattagtttttgattttttttagttgggattagggtgaggttttcgtttaggtgtaaaagttaaggtagtgttaaaaaatttaggaattaaataatattttgaagtaatattttaaataaattaaattttacgttgaataaattttgatagggttgtgtacgtgtagggttgggtttgttttaatttaaaattttaatatttgtttattatagagattattatgtattatttcgatattgaaaaatattgtattaaatattatttgtgttgatttttgagttttttggtgtttttttatattttgtttttgataagtgtttgatatattttgttttagtcggttttgttttttaggtgtttttttggggttgttttgtttacgtttttcgtagttattaggagttattgagttattgtatttgttttattttgttttttatgttttcgtatcgtttatttcgttatgtttttttcgtgtgttttggtcgtacgttagttttagataggagttcggtgggttgggagtttatattaatgttgttttttttcggtttcggtgtcgggtatagggtagtattggagatttttttttttttttttttttttttttttttgagatatagttttattttgttatttaggttggagtgtagtggcgtaattttggtttattgtaatttttattttttaggtttaagttttgttttttggaattaagtagatttttttgttttagtttatcgagtagttgggattataggtatacgttattatatttagttaatttttatatttttagtagagacggggttttgttatgttggttaggttggtttcgaatttttgattttaggtgatttgtttgttttaattttttaaagtgttgggattataggtgtgaggtattacgtttggtcgagattttttgaataaataaatattatcggtatggagattcgtttagggaatttgtttagattttgttattgtatttttgtttgttgcgtttagaggtaatttagggtcgttttagtcgtttttatttggttattttttggtttttatttaggtcggtttgttttattttgtgggttaagaaaacgatttagtgggtggtgattagtattttttttttaatttgaaaagaatatatttattagcggtggtagtaatttaatgttttttagttgatgaaggtaatatgtttgtttataatggaatggtttatgttatggtggaatattatttagggacgtattggtatttgttataatgtggatggattttggaaatatgatattaagtggagaagttagatataaaggttaaacgtgtaattttttgtataagaaatgtttagaatcggttaggcgtagtagtttacgtttgtaattttagaattttgggaggttaaggtaggaggattatttgagtttaggagtttaagattagtttgggtaatatggtgaaattttatttttataaaaaatataaaaattagtcgggtatggtggtataggtttgtagttttagttattcgggaggttatggtgggaggatggtttgagtttgggaggtggaggttgtagtgagtagagattgagttattgtattttagtttgggtgatagagtgagattttattttaaaaaaaaaaaaaaaaaaaaaaagaatttatatagataggaaggaaatatggaggaggagggtaggattgatagttaaaggttacggggtttttttttaagaaaaaaattttttaaattttttaaatttttaattttttaaaattggttgtggtgacgatggttgtattattttttgaatagattgaaaattatggaattatgtattttaaatgggtggattgggttacgcggtgatttatgtttgtaattttagtattttgggaggttgaggcgggtggattatttgaggttaggagttcgagattagttttaatatggagaaatttcgtttttattaaaaatataaaattagtcgggcgtagtggtatatgtttgtaattttagttattcgggaggttgaggtaggagaattggttgaatttaggaggcggaggttgtagttagtcgagatggcgttattgtattttagtttaggcgataagagtgaaatttcgttttaaaaaaataaataaataaataaattggtggattgtatagtagtttatttggattttaataaagttgtttaaaaaaaaatgaaaaaaagttttttttttttttaaaataaataaataaaaagaaaaaaagagagaggggaaaaaaaaaaaaaaaaagaaaatattgagtgtagtatacgtatggtaaaggtaagaattttattacggaaatttggttttattaatatattttatttttatttttattttatatataggtgtgttttggttcgtggtgttaatcgtatgtttttttggaggttgtagtttagattggttttgaaagttgttttttgggtaattttaaattttttataatttttgaagtttttggtttgttgggattatttagttttttagatttagtttcgttattatttatttaagattgtagttttggggaggggggtttttttttaagggtgtaggggttttgtggttttatttttttttagaatatatattattttgtattgtatatatgtgttttaatatggagtattttaggacgttggttatagttagttatgtttgtatatcgattgatcgatcgtgttttgttgattaattatgttaattatcgcgttgtatattgtttttattaagcgagttaaagtaattttttcggaataagttgacggattttaaataagttaaaagatatttttttaggaaaaaaatagtaatgaattttaagaagaaagaaaaatttttaaatttatagatttatggaaaaagtttaagtttttaaagtgttagatttttttaaaagtattaggtttagatggttttacgagtgaatttttgaaaagttttaatagagagattattatgttgttgtttaaaatgttttagaaggtagagggtaaaagaaatgtatttaaattgtttttgttaagttagtataatgtagatattaaaattgataaaaatagtatatatatatatatatatatatatatatatatacgttttattcgttttagattaagttcgttgttgtgtatttaagtaatattatttatttttatttcgttgttgaaattaaaatatattttaatggatttatgattttaatatgtaaaaatgaaattatagaagtattagaagaaaacgtgggtgaaatttttttttataattttagaacgtaggagatttttaaataggatgtgaattttaaaagttaaaagggaaagtagagatttgataatattaggattaaaatgttttgtgtagaagaatattttagaaataaaattaaaagtaggtagttggggataagatattcgtatttgttgtgataaagatgtataaataatttttttttttttttagataggattttattttgttatttaggttggagtgtagtggtatgattatagtttatagtagttttaaatttttagatttaaatgatttttttatattagtttttcgagtagtcgggattataggcgtattattttatttagttaatttttgtagagatgcggttttgttatgttgtttaggttggtttcgaatttttaagtttaagtaattcgtttattttagttttttaaagtgttgggattataggtgttagttattacgtttggtttataaagaattttttttaaaaaattttaataagaaaaggatatattttttaaatgaaaagagaatatagggttttggtttataatatacgaagagataatttttttcgtttgatcgagatgtataaaataaaatattaattggagagtatttggtttttagttaggggtaaggggtataggatttttttgttggattattattgtatagggtttagtagatagttgagtaggtcgacgaggggaggggttttaaaaaattttagtaattattttagaggttaatttaggaataaggattaattttttttttttttttttttttttgatagggagtttcgttttgttatttaggttggagtgtaatggtacgattttggtttattgtaatttttgtttgttgggtttaagtaagttttttgttttagttttttgagtaattgggattataggtataagttattatgtttagttaatttttgtatttttagtagagatggggttttattatgttggttaggttggttttgaatttttgattttaagtgattagttcgttttggttttttaaagtgttgggattataggtgtgagttattgtgtttagtagattaaaatttaaatgtatatatttttgatatagaaatttattaagagtttattttttagttatgtgtgtatatgtataagtgcgagaatatttgttgtagttttttaattatagtgggaagttggataagtttggtagggttatgggatagttgatgatataattattaaaaggaacgtgttattttgggaggtcgaggtgggcggattttaaggttaggagtttaagagtagtttggttaatatggtgaaatttcgtttttattaaaaatataaaaattagttaggtgtggtggtaagtatttgtgattttagttatttgggaggttgaggtaggagaatcgtttgaaagcggaaggcgaaaggtggaggttatagtgagttatagtgagttgagatcgtattattgtattttagtttgggttacgttttgttaaaaaaaaaaaaaaagaaaaagaaaaaggaacgtgttatatttataagtggtaatagtgttgttaaatggaaaaaataaaagttggtagtagaagtttgattttttttgtgtttttgaaaagtttatatttatatattgattttttttatataagttttgaatgattttgtaggaataaaatttaggagaatgttatatttagttgttaatatggttattttttgggagagagttggggaatgggagagaaaaatttttttttaaattttatgtgatttttattttttatttaagaatgattgggtatcgttttttttttttttttttagatgggagttttgttttgttgtttaggttggattgtattggtataattttagtttattgtaattttcgttttttgggtttaagtgatttttttgttttagttttttaagtagttgggattataggtgttcgttattacgtttcgtcgtgtattgttttttaggatgaagaaagggaaaggttatagggagaatgggagttagaatatagagtagggtttttaaatattagtttgcgggtgagagagatacggggcgatattatcggtttggaatttagggatggtatgaggtgttgtttaggggttttagataaggtttgtttgttgattaagtaagggttgtgttggtttttgtttatgtgtttgtttaatacgaattttttaggcgttttattttgttttacgaattattattgtttattttaattacgttgtataggaagaattgtgtttatttttataatgagaaaacggattagagaggaaagttattaggtagggtaggggcggtagtttaggtagtgtgagggtaaagtcggtgtttttttgttatttttttatatacgagtgggtaaggtattataggagtttatattttaatttttgcgggttattttggaaggcggtagatggaattagtgatttttagggttatttttagttttaggttttagataggggtcgtggagtggaatcgagtttgatttaggtgtgttgatggtagttatgtaattgtggataaattatttttttttttatttgtattggatgagatcgggaatttttattttgggttttttaagagttttggggttttatagagtatatttagtagtagtagtgggatggggggatagggttaggggagttttatgttttttttaattttaattagagtatttttattttaatttttttttgggtttagtgtttagagagaacgggaaggaagtttagttttggttatgggttattttagtttgttagttatagtttatattttaggagttttttttggattgaaggagatagagttatttataatatttatagaaaatttcggagaggaagtggagtttaattgaggaagcgtttttttgtagtttttagaaatgaggttataggtgagatagtgtgttagggtggattatatggtatttttttaggttgtttgttggaatttagggtttggttaggggttgtttatattttgggtttcgaggcggggagtttgagtgcgtttttttagggttgaatgtgttttttgtttatatcgtatagagtatggttgtttggtcgcggcgcgttttttcggataggttcgttattgtgtagatttttaatttcggtagttgtttcgggtttgggaggcggcgggtatagatatagttttttttttttttggtagttgttttgattttttgggataagtgttgagaggcggttttatttagtgttatgtgtttgggggtcggggttttattttggggttaggttgggtggttagggttatagagttgtagggggcggagtagagaaatcgtttttagcgtttgttttttggttttattttttttcgtagttgcgttttatttaaggtattttatagttgttcggtattcgttgtattttcggattagtttttttttttttttattattgtacggtgtttggtaggtcggcgaggggaggggttttttttttgggttttggagttaggttttgttttttggttttatttcgttttattacgaaggagatatatcgggtttggttaattttttcgtattgatttttgtttttttagtatatgcgggattttttattttagatttaggtttgagaggttttagggatagttcggagaaggagggtatttgtttttagaaggggaaagagaaagagatttaattttaaagtaaaaggggatttgggtgttttttgtaagtagtttaggaaaatgggaggaggtgggagtagcgggatttttcgagtaaggtatttcggtaggaacgttagtgttttttggatatttttagaagtagaagtatatagttttatagaaaaattttgtaggtttaggattcgaggtatgatacgatttaaatttattgttttattagatattagtgagtttttcgacgtttattaaggttttttgttttatatttggtattggacgaatttgtatattttgttttagggagtttatagtttagggataggtttagagtttatgtggggtgttttgtaaatacggggttagaagttgggttgtttatggggttttttttttttaaattatagtggttattttttttttaattttatagtttttgatttttattaggaatttttggggtttagtaggtgttttttttttgtaggttgatgttcgttttttttattttttatttaggtttagttttgattttattttttttaaagttatttttttattgttttgtgttgggtggttttagggagttttgtgttttgattaattttatatttaacgttgtattggtagttttgttgtttgtgttgagatttttttttgttttgtttttggaatatacggttcggtgcggattaagtatgcgaagagttacgtttattattattagttcgggggggtttgattttttgtttttttaacgttttatttatatgataaagatttttagattttttgggttataggaaaattattgagatatgttgttatgtttatttcgttttaattttatatttatgtttataagtggttttagaattattgtggattttttttttggtttttggggtgggtggatatatgagagtttagtttttagttatttttgtagatgtttttttgatagattaagaaattgaggttgggaggggtggaatgatagtttagaattagttgatttatggggtagagttgggatatgtttagaattgagttgggtattgggtttggttttttttttgtttttagtgagtattttaagaaggtagagaattagatttatgaacgagcgttgagtattcgttttataaggtagttttggagaaatttggttggtgtggttgaggagtcggaggggggtaattttggtggggggggttttgagttagtagttagtttttgtaggtttagtattgggtgttgtagtttagttttattttattttatttagaggtatttatgttggggggtaggaaaagagtagggatttaggagaggaggtaaggtcgtttttatttagagtttgagaggattagggatgattttaaaggatgagcgtttttttgtgggaggatagtaaggagggtgttaagtttaggggtagggttagagtttcggaaatcgagaatttattttattagtataaagtttagattttattaggttttggggcggaggagtaggtagggatgtttttgttttttgtagcgttttttttttttttttttttttttaattatttaggtgtttatatttttttttgaaatgttgattttttttagaatttttatattgaagttaatatttatttattgagttttttagtataatttttagaggagagattaggtgttttgggggtaaagttgattaggaaagtttttgtttggtttttagggacgatttatgggggttattatatttgtttataagaattataaaaaagttattttaatttattattagtggtttatttttttagtataattttatggtatatttattatgtttaagttatttatttggtattttatgggattttttttttttttttttttttttttgagatagggttttattttgttttttaggttggagtgtagtggtataattttagtttatcgtagttttaattttttatgtttaggtggtttttttattttaatttttttagtagttgggattataagcgtatgttattatgtttggttaattttttgtattttttgtaaagatagggtttttttatgttgtttaggttagttttaaatttttgggtttaagtaatttgtttgtttcggtttttaaagtgttggatttataggtatgagttattgtatttggttttttatgggattttttataaaaattaagataggttgggtacggtggtatgattttagtattttgggaggttagggaagttgaggtgggtgggttacgaggttaggagttcgagattagtttggtttatatggtgaaatttcgtttttattaaaaatataaaagttagttaggcgtggtagtttacgtttatagttttagttattcgggaggttgaggtagaagaatcgtttgaatttgggaggtagaggttgtagtaagttgagattatgttattgtattttagtttgggtgatagagagagattttattttaaaaaataaaaaataaaaaaaaaatataaaaaaaaataaagataatagttttatttttagaatttagtgggggtatgaaaggaattttgaagattatatagtaaaattttaagtatggatatcgttggtttataggtgaattttaggtttttttttatttttgtattttttgtattttaaagaaagggtattcgattattttttatgatttgaaaaattatttttatatttaaaaaaaaaagtttagtagaggaaagaaagtttatatataaattatttatattttaagttaaatacgaggtatttggattaggttttgagggatgtataggagtttattaaggtagtgatgtaaagagaagtagaggttagggtttaggaggttagggtaaaggggttgtgaggaaaggtgtgagagattaagggaagattaaagtaggagaagttgggaaggagagaggtgtgagttgagtaggagagtgaattaatcgtggaggggtttatggtgagtgagtagagaaggtttagtacgggaagagattttagtagtgttgtgttttggggaagttagtttgggagtaatttagttggggttttaggagattttgttttgtatttatagttttggggtggagataaattatagtatagatgttttttcgtaggtagaagttaaggggttgggcgtttgtttagagggtacggaattttttttatgatttttttttttatggtgttagttggatttttggtgttcgggggatagaggggtcgtagagattggttagagttgtgtatgtcggggtttagggaatttttagtttagttttatatggaggggtagaaggggatgggtttgaaggaaagatgggtaggaagttgagttggagagaattggattcgtgtttagaacggtcgtgatatagagagggaggacggagaagtaagtaggtggtgtttcggaggaagaattagtggggtttaggtttgggtttttcgagaagttatttttatcggattttaagagtatttttttattgggaaggttttgttttcgtttgtttttgtattttttttatttggatttgtttaggtttttaggattgttagtttagtttacggatttttttacgtgagttggatttttatttgtataggtttttgttcgtgggtggtcgggtttgggatgttgatggtttttttttatgtttcggttttaacgtgtatattttattttatggagaaagttatcgtttttttagagcgttaggtttttggtagttttgaacgttgttgtttttacgtggtttgttttttttttttttttttggtttgatgaaattgtatttttattgttggggaagttttttggatattttttgtgttttagttattttgtttacggttcggtgagttttagaaagtagagttcgtaggttgtgtttttgggtttggttttcggtatagtttttggtataatttaggggttaaattgtgtttgtttttggaggagaatgtttttgtatatttttatggatatttttttatttgttttttagagttaggattacgtttttgtgtatttagtattagttattatcgagatttagatggttcggtgataatcgtttttttagttatattttgtttgatttagttgagtgtgaatatattaatttaggatgggggtgtattcggtacgttaaataaaggttttgtattaatagaaggtaggggaggaaatagttttttgttattttgtaaattgtttatgtttttggtttgatattatgttattagtaattattgttattgagtttgggtggttggggtagggtggttttttagagttaagtttagagagatgggagagggaatacgggattcgtatattgagggtcggaaaggattttttaaggtttattagtttttggttatttagtgtgtttcgatgttttttttgtaggaaatgtagagttttaggttttagattcgttaagataaatgtgtattttatatgtttatgaaagtatgaggagtattggtttttttttaaatttatattttttttaggttttatatttttttagtttttaagtttattgattattggagaatttttatttaaaaagaaaaattaaaaaggggttgggtggtttatgtttataattttaatattttgggaggtcgaggtaggaggtttatttgaatttaggagtttgagattagtttgggtaatttagtgagaatttgtttttataaaaaaaatttaaaaattagttaggtatggtggcgcgtaatttgtggttttaggtatttgggaggttgaggttggggaattatttgagtttagggggtagaggttgtagtaagtagtgattatattattgtacgttagtttggaggatagagtaagattttgttttaaaaaagttaaagaaaagttaaagaagatggaaagagggatttagagagatgtggaagtaatttaagggtttatcgatggaggaatagttatataatataagtgtatcgtataatagaatattatttagtttttgaaaggaaggaaattttgttttatgttatagtacgacggatgaatttttaggacgttatgttgagtgaaatgagttagatataaaatgggtagttattgtatttttttatatatataaggtttttagagtggttaaataaatttataataaagatagaaaatagaatggtggttgttagtagttgggggaggggtatggggagtttggtttaacggggacggagtttagtttgggaggatgaaaagggtatcggagatggatagcggtggtagttgcgtaatatcgtgaatgtattgaatgtcgttgaaacgtatattgtaaagtggttaaaattgtatattgtatgttgtgtattttattacggttagaaataagaagtagtagttaaattaaaaatttagattgtgttgtttgtttaatttaaagaaggtttattgagtattattgagttttgattttgtgtttagaattagatttggtttttgaggggtttttaatttagttggtattttattatagttttatggagttacgatttttgttggggttagggggtacgtttttgagaagggatttaattatgttttatagtttggtatttttaaataggttttgtgttttataggattggtattaattttttgtttgtaagttttatgttagtacggttgtgggtttgagtttttttaggacgttgttggagttttatggttttttttttttcgttagaagggtatttttaaataaaatcgtgtgtagttattatatagttttttggtttaggtatttttttttagtgttttgagaattttgttttgtaggttaaggtgttttttatgtttttttttttttgttataattattttttttgggggaggaggattagattatgggttttaatgtaagttttaggaggtatacgtttttttttttttttttaagttttcggtttttgttgggtatatttaggtagtttgtaattttttaagtaggagttattagaatgtgatagtttttttaggggttttaattttattttgttttatatttttgtatgagtttgttttggtttttgcgtggttttttattttttaagttttttaggttttttagggatatatagtagatagaggttttagtaaggtttacggtgatttataaaggaggttttttgaaatttagaaaatttttttaaatttttatttaagtttcgtttggggtattttggtatgtttttattagatagagagagttattttttttgagtttgtagatttttatttttatgtatttcggtttttttgggtttttagggtagtattttttattttatatttagtttttttttttaagattttgtggtaaagttagtaattaggttttttattattatagtatttaagatttagcgttttgcgatttatttttttggtttcggggtgtagttttagttatagggggttggggtttgggttttagtttgttttgtagttgagatataggggtaggttttgaattttttaaggtttgggttgggttgggggcggtgggcgttttagtaggtttgggtatttggatttttatttttttgggggttgcgtcggtggtaggggtagtgggtatttcggggattttggaggtagggggttttatttttcggtgggttgatttttggggtttgacgatggtgattttcgtttttcgaggggtcggttttggcgttttgtggtttaatatttcggtttttttgagttcgaatcgggacgggtcgatggtttcggcgttttttatttgtttggacgagatgttaatggatagtttagtgcgtcgggatatcggttcggtcgttttggggttcgagagttttatttttcgtagggacgttttgggggagcgttggtttagggagtttatatggcgggtcgagggttttgagttttttacgtttaggttttggaatttttgggtggagttggttatagtggttcggagtaggggagtttggatttttcggggtggggtggagttgggtgtttcgattttttcgattttaaaagatttttttaaggttgaaaaataaagagaggggatgtaattggtgaatggatggttagggaatatttcggtatgttttttgttaaggagtagtagaggaaggtaggcgatgcggcggtgagggtcgggggttttttttcgttttttatgttttagtaagcggaagggatagttttattttaggagaattattatgagttttggggtagagatgtaggttggagtgggaagatgttgttcgtcgtgttttgttatggttacggcgtaaattatatagtttttttttttagttacgtttatataggaacgttttagttttagagaagatttttatttttttttttttttttttgagatggagttttgttttgttgttttggttggagtgtagcggtatttttcgggtttaagcgatttttttattttagtttttttagtagttgggattataggtacgggttattatgtttggttaatttttgtatttttagtagagatggggttttattatgttggttagtttggtttcggatttttgattttaagcgatttattcgtttcggttttttaaagtgttgggattataggcgtgcgttatcgtgttcggttttgattttttttttgtcgcggttgtttttatttttttttatttttagttaaggtatatattgggatattattagtaaatatatttttattattagttatagcgggggatatgtttttaataataagtgatcgtaattgtaattaattagaatcgtagtaggaataaaattttattaatgatattaagggcggatattggagtttttagtgtcggcgaggcgtcgggtttatcgagtttattatatttgtagtcgtttaattttgggatgtaaagaatattagtatttttagtatagatggggaaagtggggtacggggtagatatagagttagattgtatattaggttgatattagagtttaaggttttaattatttggttgttcggtttttttagtttagtttataggaattaatttttttagttattagttttttttgtatttttttatttattattataagttcgtgtagtgatgttaattattagttttcgttttgtagttattttgtttttttattagggtttgttttttcggaggtagtggggatggtatttgggaagttgttatttttatagtttttataatcgtattttaaatgagagttagtcgtttttggttattagggttagagtagggagggatttatatggtaggtatatttattagttttttttttaggttagatttatagcgtatttttgtggagatttatagtgtttttttagtcgttttttgttttattaggttatagagttcgggttttatgggattttattattgttttttttgtttataggaaaagggatgatagttggtttttagtttttaataatagcgttttaggattaattttagtgttttttttttattcgtttttttttttttaaatgtatttaggtattggggaggggaagaggaagtttaattttttaattttggtcgttttagttgttagttttttgggtaaggtatttttgtgggcgttttttttaagttataggtattttttttttttggtggatatagacgaaattttgggttattaagtttaatttttattagaagttgggtaaggagtcgtgtggattttagagaatttttagttgttataggttttgttttagtttcgttattgttttagaggatatgggttcggcgtggttagagttgtttattttttaagagagtagaaatttggatttttatatgatattttttgatttttaaatgttggtataaagtaaaataagttttttttaaaatattgagtagtttggttgatgtggtgaaattttatttttattaaaaataaaaaattagttgggtatggtgatattcgtttatagttttagttatttaggaggttgaggtaggagaatcgtttgaattcgggaggtagaggttgtagagttgagatcgtgttattgtatttagtttgattgatagagcgagattttgtttttataaattaaaattaaaaataaaataaaatatcgtagggttaaataaaattaaatttataggttgtattcgtttatgggtttagttatgatttttagttgattacgtggtcgtagggtagtaggatattgagttttagagttaggggtgtgttaggtgtgggttttcgatatggtgtttttttgtttttttgtattttgtatgtaaattgttggttgtgttttgattttgtagaagttttagggttttaaggaaaggttgaatgtttatttttattagttagaaagtttagggtttaatgtttagaattgaatgtaatgagatgggtttattaagtttattatatttatattcgtttaaatttgggttgtaaagaatattattatcgttttcgtatagatggggaaagtgaagtacggggtagatatagagttagattgtatatcgggttgatgttagaaagtgtagagtttaatgtttgggttttcgtgcggtttttagggtttttcgcggttttttgatttgttttttgttttttgagtattgtttaaattgtttttatatggtgtgtttttgttttatgggtgttgtagagtaggggtcggtttttaggtgtttttagtattttttcgtgcggttaagttggagaatagaaattagataggagaaggttttgttttaggtttaatttaagaaaataaatgattttttttgggagattcggtgaattttttttttgggagtttttttggagttatttttattatggttaatttatgatcgaagatattgtattaaagtagaggttgttttggtgtgagtttacgattgagtttacggtgcggatgtaatgatttattttagttaggtttacgtgtataagcggattattttagaatcggagttggttttttttttagggtattttttttttttttagttgtttgcgtggttggcgttttattattttggttatttgcgtaaaatgtatatgtgtgtcggtttttaattattttttttttttttttaatgtttggtgtttttttatggatgggtttttttttttttattagttggtttttgtgtttattgtttggttttatgatttttttgggtgtttcggtttagtattatttttatgtttattagtttttagtaagttttgagatagtaggggttgttttattcgtaggggttattttattattaggacggcgttgtttaaaggcgagtttgttttagataatagttaggagattttatagtttttagaattgtaagagaatataattgtgtgttagaagaatagtgagaataggaggcgttttatttcggaggtgtttattttttttaggagatgttttattttgggggtgtttattttttttaaggaaattatgtttcggttggaatgttaagaaggtgatatttaaatgaagaggtgtttattttggtttacgttatttttttaaacgagtatgttatcgtttttttttttttttgggaattttttttaaagttaagtttattttagtttttttttcggggagttggttttttatatagtttatattattttttttttatgttattttggttacgttatgattgttgagattggttacgaggggtgtgtttcggtttttcgggaatagagttgaatgttttttattttatgatattatgtttttattaggttttaggcgtttttagaaaatttattaagttaggcgtggtggtttacgtttgtaattttaatattttgggaagttaaggtggatagatcgtttgagtttaggagtttaagataaatttgggtaatatggtaaagtttcgattttattaaataatataaaaattggttaggggtggtggtatatgtttgtaattttagttattcgagaggttgaggtgagaggattatttgaggttaggagattaaggttgtagtgagttatgattatattattatattttagtttggatgatagagtgagattttgttttaaaaaaaaaaaataattaaaatttattaaatgttaggcgtggtggtttatgtttgtaattttagtattttgggaggttaaggtaggtttaaggtaggcggattatttgaggttaggagttcgaaattagtttggttaatatggtaaaattttgtttttattaaaaatataaaaaattagttaggtatgggggtgggcgtttgtaattttagttatttggaaggttgaggtagaagaattatttaaattcgggaggtagaggttgtagtgagtttagatcgtgttatagtattttagtttgggcgataaagtaagattttattttaaaaaaaaggttggattataggattataggataggtataagttttgagggagtttttaaggaggagggacgtattagatttttatttttattttagtttgtgaagatttattttcgtttgaggttttgtagagggttgattagtgatttttaaaaagatatgtttaatatttaattttaagaatttacgaatgtgattttatttggaaaaagggtttttgtagatgtgattagggatttcgggatgagattattttggatttgggatgggttttaaatttagtgttcggtgtttttataggagaaaggtagaaggggatttgggatataaagagatacggtggggagggttacgtgatgagagtagagattgtagatgttgttagagttaaggagcgtttgggttaacgtaagttggaggaggtaaggaagggtttttttttcgagttgtcggagggagtgtggttttgttaatattttgatgttaaatttgtggtttttagaattatgagcgaattaatttttgttgggttatttggtttttagtaatttgttttagtagttttaggatatttataacgagatttttgggaagatgaaatttttggttgtatagtggtttagggtgaggttagttggtgtggttatttattttttagtttagttttaattttattataattatattcgataaatggtttattgtgggttaacggatacgtggttattttagagttgttatattaggagtttagaggagcgagagttgtttttttttttttttttggagtcgtataaaaattttagatggttggagaagttatcggaggaattatattattttagatttttgttttattgttgggatatgtggtaatgaaataagattatttttgttagggatgttttatgggtaattgtttttttacggaggatattgtgagttgtatttagtcgggaaatattaggagatgtttgttattaggttggtagaatagggttttttagtatttttttttttattagagttttaagattgcgttttgggttttgtagttatatacggtcgtttttttttttttaatgtgtaggttttttgggaagttttttgttattatttttatagtggaatcggtataatttgtttaggggtagtaggtttttgttattttatacgtttttattttttttgtggagggagacgtagttaaggggtatttatatttatttatagaagcgagagtgttcgtgagtttgttattttgtagattttagaatttcgtacgtgattgtatagatttataggtttaattgggtagatttaaaggatttacgtagtagggaggagtatcggatagtttttttttttgtttgtaaggagttaatgtaattgaaggatatagaagaggtttttagttgagtattataattgtggatcgtgtatagtgttagaaagatgcggagttaggttatgttgggaggatttttatgttgttattggaaggtaaagtagtgttatttttttatttatagagtaggaggtttttatttttgttagttattttttttatttgtgaatttaagttttttaaagttagattttaatttcgtaagtttttaaaagtttttttgggttttttttttaatttttatcgattttaatttgttttaaaagtttgaagatcgtttatgtgttttggtttatttttgggaatttattttaaggaaataattagaagtatagaaagatttacgtacgaggatatttgtattagtattaaattgataaaatttggaaatagttcgggttttcgtagattttttaaatttatatgttaaaggtttgtattattattaaaattatatttttgaagatgagaaatgtcgagaatattaagtaaaaatagtaggatataagatgtatataaagattttaattttattttatatatatatgtgtagtttgtacgtatatatatatttatattcgggtagaaaataacgatttttggatggaatgaatggcggtgggtgttgtttattatatttttttgttttttgagatgtttatattatatggggattatttagtatgtttagggaataaaattatcgatattgtttttttttttttttttttttgagatagtttcgttttgtcgtttagattggagtgtagtggcgtaatttcggtttatcgtaagttttattttttaggtttacgttatttttttgttttagtttttcgagtagttgggattataggtgttcggttattacgtttggttaatttttttgtatttttagtagagatacgattttatcgtgttagttaggatggttttaatttgttgattttatgattcgtttgtttcggttttttaaagtgttgcgattataggcgtgagttattgtattcggttaatattgtttttaaaaaatatattttggtattggttgggtatggtggtttatatttataattttagtattttgggaatttgaggttagaggatcgtttgagttaggagttcgagattagtttgggtaaatggtaagattttatgttggaaaaataaaattaaaaaaaaaaaaatatatatatatatagattttgatgttaataagttggagggtgtgggtaattgtatgttggtttatttttatttttatttttggaaaaatattttatagtttaggatgggtatagggttttttttatttttaagtatttacggttttagttgttatataaaaagaggttatagtgggttattttttagatgtaaatttttttttttaggtttatggcggggtcgaaataggagtagtttggatttgggtttatttagagaggaatgtgtcgtataagggattattgttaaggtttttgttttgattataggttgtttggtaaatcgtttttagtttttgaaattagattaagtattttttggtgtatatattaggttttagtttggggagggaatattaagcgagttatagagttttgttttagtttgggataaatgttatgtaaagaaatggtagagtttaaggttagaataattttatgcgtagtttagttttcgtaggagggagtaacgtggtttttgtttagggtagggtggaattttaggtttaggttttaggaacgttagttttggttaaattgggttttttttgagtagtagtaaagtaggttttgtttttgaagaaatattggttatttaggagttagggttagggtttagggaagtcggatagatggtgttaaggagtagggaagtatttttttgtatgttattttgagtttgtaggaaaaagttacgggaaaattttatttggtagataattttttataatttttaggatttatagagtgagtttagtagtatgtacgttatgggtatttttttgtttttatttttttgtgatattggattttggtataggtttttgatttgtgtagggtggggtgggtagttaggtagggttttggcgttggtagagtggggtttagttgtaaaggtttttttattttttatttatttaggatttgggggacgaggtttaaaggtttggtgtgtttttaaggagtttaaggattgttttagggttggagataggacgtatgggtttgtatagggatcgtgttttttattttagggttgagagtaggagaattaaataggagagtgatataattatagtttattttgagttttagtgtttttagtgttatttgttgtaggaggtgatggggtaataaggtgtttttgaggttaggcgcggtggtttatgtttgtaattttaatattttgggaggttgaggtgggtggattatttgaggttaggagttcgagattagtttgattaaaatggagaaattttatttttattaaaaatataaaaatagttaggcgtggtggtgtatgtttgtaattttagttattcgggaggttgaggtagaatagtttgaatttaggaggcggaggttgtggtgagtcgagattgtgttattgtattttattttgggtaataagagcgtaattttattttaaataaaaataaataaataaataaaaaataagattttttgggtgtaggtatggtacgcggtaggggtgattgttgttggtgtaattattattttttgggtgtgtgtttgtgggggttgtgtatgttgaaatgtgtggttattttgttggtgattaaggttgttttggttttattgttattaattacgtttattgattttatatggtttattttcgtgtttttatttagagttttttttagtgtttaagttttcggaaggttggaaggagtgagtagtgtagtttttggttaagaattgaagtataaaaattttagtttttttatttaattttaggtgggataaggttgggggtacggtttgtagtttttttatgttgttcggtatgggggttgggtagttatttgtggttataatgagttggtgaggtattttttattggttggattttttgtttggtttatttttatatttaggtattttttggtgtttttttttattgaaatttttgttttaggatttgtttttggagggatataaattagttttttagaattggtttgggttgtttggtggaggagggaggtggtttttggggtaggtggagtaggtttcggatagggaggaggatatagttggggtgatggggaggggtgtgtttttaggaagtaaaatcgtttaaaaggaaaggtttaaaaataggcgtagtgaagttgagcggagtttgtaaagggaagttaggaaatagtagtgttagtggagggcggtttttaggttttttatagagagttatatttgtttagggatagggataacgtgaatagaaggtaaagtttatattaaggcggaggaggcgttttttttttagagagtcgtagttagatagtttaaatttgttaaaggtttgggagggaagaattagggtattattttatttttagtttaattttttttttagttttttttttttttgtttttttaaggttaggtttggttgggttatagtgttagtagttaagattcgtttttagtgtcggtttagttcgtaggaggttagtttggtggttaaaggttattgattgtttaggtttatttgtatacgtggtttaatgattgaggtttgggatttggggttattatttatagtatttttggataaggaggaaaagaattatttttattaatttttggatggaggtgtagggagcgttaatagtatttttgaaaattttaaatgtattaggggggttagtatttagggaagagttataggaggttattttgatggattttgatgattatttttgtttaagtgttaggaggaggtttttttttttttgtttttggtaattttgggtttaagaagttttaggtatttcggaggttttttttgtttattatagttttatttaagaggtttggtttattttgtaatgatgatgtgagaatgagtaggtttgtttagtgttagagtttgtggttggattttcggttgaggttaagagaaataaataagttttttttttttttttgtacgttataggaagagtagttcgttggttgtaaggggattttttattttgtttatggggtatagtagtttatagtattttttttagaaacggagtattggtaggtttgggtttttgtaagatggaatataaaggggtgggtagttgattttaatagttagtttttgggattttaaatttttttttattttttaattttgtgatgttaatttttttttggataaagttttttaataatttggtaagttagtattagttgaattagttttagtttgaattagtagttttttttagtttagttatagttttatttttttagaagggaaaagaagttttacggatttttttataaggaatttttagaatttgttatggtgttcgtaggggatattggtattaattttgggtttattaaatgtagtgggtttaatagtgttttttaaaacgatatgttttaagttttaatttttggaatttgcgaatatgattatatttggaaaacggatttttgtagatgtaattaaggtaagggttttaaggtgagattattttgaatttagtgggttttaaatttaatggtgagtatttttataaaagatagaaaaggagaaagatatatagatagggggagaaagttacgtggagataggggttagagattagagatgatggtgatgcgtttgtaggttaaggaacgttaggaatttttaggagtcgtcggaagttatgtttgtaagtttttaggttgtggtattttgttatagtaattttaggatatagattttaggaatagaatatagaaaagaaacgggaggaggtttagagtttgttgtggttattttagttattttattcgatttttttagtgtttcgttaattttgaagttttttttagttattgagttatcggttttgaaaaggagatatgggtgttttggagttggtttagtttggtaggaggtagtttcgttttattgtttttttattagttattagtttatataggttttttatagtgggtaagtgcgttgttgttttagttttcgtcggttttttttttgttcggttttattagtcgtagagttttttgttgttgttttttttggtttaagaggtttatatatttagtttttttgggataaatttagtttatatttgttgttttatcgtagttatttaagggttttttttattaacgtgttttttaagggatagtaagttatacggtcgttttatttggggttagaattgtgttttattagagtaaggttttggagtaattatatttagggttagggagttatttgtttaagaatagaaacgtgtggtcgggcgcggcggtttacgtttgtaattttagtattttgggaggtagaggcgggtagattacgaggttaggagatcgagattattttggttaatatagtgaaatttcgtttttattaaaaatataaaaaattagtcgggcgtggtggcgggcgtttgtagttttagttattcgggaggttgaggtaggagaatggcgtgaattcgggaggcggagtttgtagcgagtcgagatcgcgttattgtattttagtttgggcgatagagcgagatttcgttttaaaaaaaaaaaaaaaaagcgaaatgtgtagttttttttttttttatttttgaaatatgaaggggaggtgattgtaggttttttgggaaagatttttttattttttttttttttttttttttttaagacggagttttgttttgtcgtttaggttgcggtgtagtggtgttatttttgtttattgtaagtttcgtttttcgggtttatgttatttttttgttttcgtttttcgagtagttgggattacgggcgtttgtttgggatagttacgtagtagtttttgttttaagttatttttttttacgtagagtagaattaggattatagtaaaggttttagaggaggttatcgtttatagggttttgggttttttttttgaaaggtagtttagtttttaagagggtaatagcgattgattcgggacgaaggtttttttgtgtttgttttcgttatttatcgcgtgtttttggtttcggtagttatagggttattttaggcggattttaaagtggcgttaagttgttggatttttttttttttttattaaattagttatgggaatgggagtatttttggtatatttttagatgtgttgtattggtttagcgttttttttattttcgggttttaaattagttgttggttgttttattaggagtagattgaggggaaatgggcggaagtcgtaggggaagagatgtgaggtagataaagaggaagaattttttggttggggtggggtcgttagggtttgggtgggagggtcgtttatttttcgtttttggtggaaggtagtagaagggtgggacggatttgtgtgggagggtttaggtgtggtttgtttgggggtaggagagggattagatgattttttaggtttttttgggttaaagattttttgataaatggttgtcgttgaaggtaggagcgaggttttgggaggtgattgatttcgaaaaattataggttgtagttttgagggttttaaaggttaagtacggagttttttaaaatgaggttttttttagttttaatttatttacgttttttaggtggttttagatatttcgttagggtttttttggtagtttttcgttttcgattttggagatagagaaacgtgatgttggtttttggtttgtttatagttttttcgtttttattatagggtcgttagttatttttttagtttatcgcgtgttttttttttttttttattttcgattttttaataatagtagatttttttttaaatatttttttgtttagatttcgggttttacgtatgttgtttttagaaatgtattttagttttttgcgaggagttagtaaggttgttcggtgtttttttttatggatgggaagttttgtcggggattaggattcggatttggagattttgaggagcgtgttggttagtgtttgttttgaggttcgggatagagttgttaggtataggtagtatcggtgtgagggtttagtttttcggataagtttttttttgtttgtttttagatttgttattgtatatataggcggtgattatttttgatttgtttgggtagagaagttattttttttttttttttcgttttattgtttattaggggaaatgttataagtatttaaaaaatgtaaaaaaaaaaaaaaaaaaaaaaaagcgtttaatattaggggttatttggtttaggtggagtttttattaattacggggttttttgtgttgtggttttaaggcgggtagtcgatggtttttgttcgagttaatatgagttgtagtttaattataggggacggtgattttagggagtagagtttaggtttcggttatagttgtatttaggagttagttgttttttagatttgtagagttaggggagaggtttggaggatcggtattgaatgatatgatttaaagcgcgttaagttgggttggaggtgacggtagagttatagtggttatagagtttttacgtgaatttatacggatttgtttggtttaggttttgttgaattttagggtgaggaggatttggtttttatttttaaagatatgaagaggttgataaagaagagttataggtaaaagggggtggtgggtgtgttgtgtaggaggggtcgtaattggacgtagaagattttagaaggggtaattagagagaggtagtatttttagaagacgggttgtttggttgttttaaatagtttagggtgtgattgaggggattttcggatttagtcggggttttttttgttttgagataacgtattgggaaattttattaagtttatttaagaatttgaaaagttttttggaaatttagcgggtagggcgggtttttgggaggatttttggtatatcgcgagagttagatatagcgagggggttttatatttttgtttagaagttttacggtagaggggtagaagtttagggaggagtaggcgttgagattagaggggtttataagagaggggtttggggtagggggtagttgttgagaagtttaggaaacggcgtttgtttttggggaagtgaagttttgggaatagggttggtgaaggggggcgggaagggggaggtgggggtggagggttaggttagattaggtattttttttagtagtagatttatgagtttttggaatttgtttatagaagtgataagtgttttgtttttagtttcgtttatatatttatttattaagtgtggtagggatagtcgttttttattatttattttgggatttggatttaagtggaggtttttggaggggtagatttaggggaaagggtttttttagaagtagtcgttatttagaggatttgagatgagaattttattacgtttttattagatagaggagattcgcggtgttttcgagtttggttttttattttttatttagtagcgtttttttcgtttattttaagtttagaatattttgttttttttaagattagttgtcgtagtggattgaatagtgatttttaaaagatatgttagagttttagttttcggatttgtgaatgtgataggagttggaatagggtttttgtagatgtaataaaggattttaagaggagagtattttggatttagggtgggttttaaatgtaatgataagtatttttacgagatatagagatatagagaaaaggttatgtgaagacggagtagggagtggcgtgacgtatttatatgtttaggagtattcgggagttattagaagttgggagagaggtttgggtcggagtttttcgtagaggttttaaaggattagtttggtcgatattttgattttggatttttggtttttagaattatttttagtttttaaagttcgtggggttttgttgtagtagttttagtaaattgttacgggggttttttttttttgttaagtttggtatttaaagttttttagttatttggggttaattatattgattttgggatttttaggttattcgtgtgttttatttttttgtttaatttttagtgtttgtgtggttatagtttttttttcgtgatatgagttttttgggtttttgagtgtttatttgttttgtattgaaggttgaagttaaattttggagagaattgattttttttgtgggtagggtaggtattgtgtttttagtatagttagagggtattggttgaaatgtgtttttgtaaagtgttttttttatgttcgtattttttttttaagtggggaagttagagaggttttttcgattttttttttagttttttggggtaggaagtttgtggttatttgttcgtaaggattaggtggatagataattagttttttttaggttatattttattaatagagggttttttaattttgttggtggtttatgagagaaggaaaaattgaaggagttgtttatagtaaattttaaatttttgtgttagagaggtttatggttgagtaaggtatttttatttttattgttttgagttgttaatttagtttagtttagtattgtgatttttgatttgtttgtgggttacgggagtttggtttgttaattagtattttttagatatttattttgtgaagtttttagtggttgagtgttttttcgtttttttcggatagcgtgggttataggggatattgggtaggaagatagttaagtttttattgtttagaaattgtttgggtttattgtagtaatagggatttatttattagtatgaggtttttttgtaggaggggtgggggtaggagggagtttgtggggtatagggttgtaggaggagttatttttttttttattaaatcgtaggttttagttaagttatttttagtatggttgtttgcgtgggaagtttatagttgagggattgtttgtacgtggtatgtaggagttataagcgttatttatattttatttcgggttaggtagatgatttttttggttttagttttttgatgaggaataggaagggttggatcgaaagattttttttagttcggatatggaatgattttacgagggttacggtgaggtttgttttagtttcgtatattagttcgggttagtagtttttaaaggtatagtcgtaggggttttggagtagggataaggaggattagtttattttatttttttgggtagaggttaaggattttgtttttggtttatattttttgtggttaaaaatgtagaagtaagtagtgttggtagaggtatttagatttttgggtaaagtaggggttttatttgatattttaggtttggagtacgagaaaattagtttaggttttaggttttttgattgttagcgattagggaatgtgatatttttcggtttttgtttttttattttttaattttagggggagattaggttgggtgatgtgtttttttttttgatagtaaatttttatttatttttatttttatttttgttttaagagggggttttttatggtcgggcgtagtggtttacgtttgtaattttggaattttgggaggtcgagatggatggattatttgaggataggagtttgagattagtttggttaatatggtgaaattttgtttttattaaaaaatatgtgagttggtaattttaagtttttagtagttttcgaatggaggttttttttttgtaggatttttaaattttataaatatgagtgtttgtaatttagttatttaggaggttgaggtatgagaattatttgaatttgggaggtagaggttgtagtgaattaagaacgtgttatcgttattttagtttgggatatagtgaaattttgttaaaaaaaaaaaaaaaaaaaggtgggggtttttttatgttgtttaggttggttttaaatttttgggtttaaggaatttttttgttttagttttttagagtgttgggattacgggtacgagtttatgaattttaaaaaataatatttattgttttgtttttgattgtaaaaggaatttaggtataaagtcgaaaatttgtaaaatgtataaaaataaagggaaaaaatttataaatttataatttaggtaatttttattaatattttgataaatgtttttttattttttattggggagtgtgtgtgtgtgtgtgtgtgtgtgtgtgtgtgtgtgtgtgtgtgtttaaataggtttatatagtgatgatgttgggtgtttttttttatgtggcgttatgtggttgaggtttttatatattttgggttcgttttttcgatttttttgtagttttgatgttttgattttagatatgttatttttggttcggattgtttaggagaattatttttggattttgttaaaaaatggattgttggtttttaatttttggtggttttggtttaggagggttgggtaagtttgggtatttcggagtgtttttggggcgttgtaggtgtgaatttttgtttttttgaagatttataagttttattttttttattttttttttttttttcgagaattttataagaggaaagtttttattcggaggttgttagggattcggagttgttagtttatagttttattttgtttttattttttcgggagttatttaaggataatgtttagttttagttgttaagttttagttttagggttagttatatattgaaggatatgtagaagtcgtcgtgtgttgggtattgttgaggataaaggtttgaatgataagcgggaataaagttataaggttttaaaatttgttcgaggttttatagttagggtttcggaaatttatgaaaaaagttagtttaatattttgttacggaatataggtaggagagggagtagtttttagttagtttttagttagtttttcgttagtttttttgcgaattattttatttcgggttatagttagggtagtcgtcgtttttttttttgttcgatagtttttgagggtaggagttagtttgtttattattgttttttttttattagggtttggtattttgtttggtatgtagtagaagtttaagaagggtttattgtgtttattttgtaatagttaatgtgtatgagtgtttattatatttgaagatagtgatttatttttgtttttattgtatagatgggaaattgaggtattgagaggttgatgatttttttatattgtcgtgtgggtaagggtaaggttagatgtgagtcggtacgttgggttatcgcgttttttgtttatatttcgttttgggtttgggaaggttattttcggagatttttacgatgttgatatttcgtttagttttttcgtgtatttttttttacgttttttagttatttaaagtattagttaggtagtattgttattttggttttgtaaatttagttattgagtggaagagtagttaggttgaagtggggtagaggtagttttcgttagattttagggtcgggatttttagttatttttattttttaaggattagtagatagagatttttatcgtgtttagttaggggttagggaataggtttttatagtgggggagtgatggatggatgtaggtgcggattgggaggattcgggtcggttttttagcgttggagttttagtagtttaatttattttgttgggttttcgtggggattaaaagatattttgtatataaagtattagtttagggtttggtatttaggaggtgtttaattaaaggaaatggttatgaaaaataataaggagaagtttagttataggaggtgtttgtgggtaaggagagaatagttggaagggtttggatttgggttagagataaagaatgtaagagggagggagggagagaaggagggagggagagaaagagggagggaaagaaagagggagggagagagggagggtagggtaggtaatagttggttttagggtagttgtgtgtaggagtttgttttattatttaaatattaggagagatgtaaatatttgagtgaggtttttttagtttggttttgttgtggttatagttagggttggagaaagagttttttttttattagggttttcgttttgtgttttttattttagttgttttaagattttatgttttcgggttaggagtaggggtttgagagtagtaattaggtagggtagcggggttagggagggatttcgtttttgtttttatttttttttttcgtttttgtttttatttttttttttttgtatagtattgggtttgtaaaggtgcgaatgaaggatttttttttttattcgattttaaggggtttaggcggttaagggttttttttgtagtttagaaaaaaaagtaaagtagttttttttgaggttttttggtggaggtttagggtttaaagttcgttgttataaatttgtagttttttttgtttttttaatagtgttttttttttatttgggttattttattattttggttttttttagttttttaggttttttggggaggaggatagatgtagagtttggatttcgtgcgtagtagggtttttttaatgttgcggtgtatttcgtttggttgcgggagtttgttttatgttatgatttgtgttggtattaatagtttttttttttattttttatttgagtgtcgagggtagttgtgttaggtatagatatatagttttttatatatattatgagtttgtagaaatggtaagagaaggtcgagcgtagtggtttatatttgtaattttagtattttgggaagttaaggtgggcggattatttgaggtaaggagtttgagattagtttggttaataggatgaaattttgtttttattaaaaatataaaaaattagttgggcgtggtggtgcgtgtttggagttttagttatttaggaggttgaggtaggagaatcgtttgaatttaggaggcggaggatgtagtgagtcgagattacgttattgtattgtagtttgggtaataagagcgaaattttgttttaaaaaaaaagaaagaaagaaaaagaaaaaaagaaaaggaaaatggtaagagaagttggttagtattatttgtttggtaaatttttatttcggtttttggttaggaagtttttttttaggaagttttttcgttttatttttttttttgagtttatgtttagatttttagtgtttagaatagagttggtttttggggtatttatggatggttgttggataaataaataagttaattgttttttttatttttagcgatgtttttggtttggtagggtatttagtagtaatgtttttcgagtggattttaaggagtattttttatcgtgtagtttgtattagggattttagttttttattttaaattaaaggaaaaaatttaattttagtaaatatatagagtattttattttttgatttttaatggggggtaagaggtagaggatagaggagaagattatttttttaggtttggtttggagttaaaaagatttgtatgtttttattgtagataatatcggtttttgggggatatagggtaggggtttggtttgtttttcgtagggaaattgtttatttacgtggaaagcggggttaagggtttttgtttggaattagttttttgtatatggggtggggggtggggatagaaggagattttgtttggattgtatggaaatttattagattgttggttgttgatttggtaggagtagagttatttttattttttagggttttgtttgggggaggggagaggttaggtggttttgtttaggttatattttttatggttaggaatgttttttttttattagaaagaaagatgagataggtttattttgaattttttggatataggaagggggtttatttgtggtttaggtggtttttttttttatatttaaggggttttataaggaggtgttaggatttttaggttttgttttagggaattgttgtttgtaaaggttataggtagagatagttaggaatgttttttatgttattggttatgggttggaggttgcgaaattaggtatagaattagaaagatttgttataggttgtaaagggttttagagagttttagttttttagaggggtagtattgtagaaggggtgagaaggaaaaattagtttttaggaattgtttatttagagtttatataatatttaggtggtacgagataacggtttattttttattttattttttcgttgttttttaagatttgagtttttgggggtgtttttagtagatagggggatgtggggtaattgtttttttttaattgtatatttggaggtaatttatatttagatgattttttcgaggttgtgattagagtttggggtaggggaggggaagcgggtggatgggaaggcgagggagatttttttaggaaagtcgttttaggtgtttgtaaggttttatcgtttatatttaaggtataggtttttggttttgaggatataggaaattcgatgttatgtggggaggagggtattgtaatgtatttaaggttaggttttttgattttttggatattggataaatgatggtttttttagttggtttagagatgttaggagtgatagaatgttaaaggttgtagggggatatttagaaattttcgagaaagaagatggataaggaaaaataaaaaaatacgagaagtttagtagagtttgagtttcgtattttcggttttttttatggttacgggtaattttttggagatttagttacgggagtagtggaggtaggtatgggtgggggggggggcgggttttattgtttatggtttcggttgatatcgaggttatttttttgtttttttaagtttttgggtattggtaggatttttaaaaacgataataaatttgaagtttttagaattgtttgttggtttagtttaaacggagtttcggggttttgtagattaaattaaatagtttgagtttagaaatgttttaggcgtttgggggtgtttaggggttaattggtgggtttgtttggttggagagatgataaatttttttatttttgggattgtgttttagagagtttcggattttttggttttataagtaatttagagtttttaaatttgggaaaaattaagagggttttggaaagaaaggtagtgtttgattatttttttttagtggttttgttaagggagagtataggaatttggtttttggttgggtttttgggatgaattaaaataaaaagaaaaagtcgggggagggggtggcggaatcgttcggggttttagtttaggttatatattaaggagattttagaggagtaggttagttttattttcggtacgatgatggacgggtatttggttggttggtaaagggaagagatggtaatagtgaggttttgaatttagtggttaagatttatttttgagtgtgattttttttgatgtttgggtatgtaagaaatgggaggtggagaaaggaggaggagattttagttttgttttttcggtattaggttattagggaatagtattttttttttaacgggtaggtagaggttataggttgttaggttgagaagtttttggtttttatagataaatgtatagtttgtatatttgtattattttgggtgatgtttattacgtacggttattatgtacgttttttattattaagatagtcgacgagattaggtggttattgtgtatcgggtatcgtggtgattgtttgatattgatttttgggggtttaggttttcggtgggtttgtttttttaggtatttagttttttttttattttttgatatttcgggtttagtgtaggggtatgggggtgtttagtggatgggtttacgggttgggtaagtagtacgtagttttggtttattagtttttggttttattattagataagatgagattgttttagttgttagtttagttttgtattatatttgattgggtttttgtagaggtttgttggatgagaatgtttagggtagtaggtattattttttgggatgtatattttgttataatcgttttttagggaaaggttagtttgtagagtcgaacgtaggttgttagcgttttcgttgtttttatggttcggttatttagtaagtgtttattttattgttagcgtttggttttgtagatgggtatatggtttatttatttgtgatattttagggtgggggtgggggtagatggtggtagggaagattaggataattttttagtaagaggaatttgtagttaatatgacgttagtttttagaatgttagttaggtaggaaaaggggggttttatggttgtattgggagtttgagtatttgtcgggtttagagggatttttaggcgggcgttattggtattagtgtttgtcgtgttttttataattagtggtgattatgttgttcggttttatttatatagtggtattatataggtttttgtttgagattttttatttttagatttgtatatttaagtatttaaatttatttgttttttgtaaatgtttttttttttcgtttagatgttatattagtcgcgatatttattatattcgtaggaggtaggattcgtgtttagcgttatgggttgtattttagagttttttagtaatttttaaagagagttgtttttaattttattttgtaggtagggaaataggcgaagaaattgaagaaatcgaagtcgtttagttttttaatggtagagtgagggcggtttgggtatttttatattgttatattttttatttttttaaagtattgtttttttggatgtaaattttgtttattagttttatttaaaatttttttggatagttatagtttatagaaagtatttttagtttgtagttatttagttattgtaggggtgttttggcgtttatttttatttgttttttttcggatatttagtttagagaatttatagtttcgttgtaaggttgattatagtgtatttgttgtttgggtgttgtgttcgtttttttttaaatgaattaattcgtagtcgggatagtgggtttgtttggttttgggttttgaatttaaagagtattaagttagtgttgttagtggttgtgggattcgtgtaagaggtttgtttttattttttatggtttttgttttttattataaaagtttaaattgtagagaggtagtatttataggatgttttgagttttggttgaaaggtagggtttattacgtaagaggtttattggtattaattagggataggtttgtatttattattaagtaacggggtttttttttttagagaggaaagaggtatttgaattttgttagcgcgttagtttttacgtttcggaggtgttgggatttttagataagaaggtatatttatatggttttttttatttagaagttcgttttatagtttgttttgtttttagaatatagatttgggggtttttttcgggcgatagtgggggttcgggagaagtttagatgttatatagttttgggatttgagtacgtgggttttgggttagattgttttaataaatattaaggatttttggattttttttcggtgtgtaaatttggttatagtaaatatcgttgagtaaagtaggttaatagttggtatttggaaaggtttttgttatataaagattcgagttgtaatcgtgtttgcgataatagatttggtttgaatttacgaaagtatatgtcgttcgttagtttcgtgtttttattaattagaagggagaaagaggaaagggttattttttttgttattttattacgggtagtggcgggtgttgtagtcgtttggaggttcgtttgtatagtggaaaagtagaaaatgagattttaaaaattttattagttaaatataaaatattttttttgttgttacgtggcggtttttatagagttttaaaattttgaagttcggagatttattttgaagggggagtaaaggcgggatgcgggaagtttgagtttatggaagatattgatattttttttatttttgggaattttgagtttgaaggattcggtttgaatagcggaaggattgaatttttgtgtaatttatcggtgatggaatataaagttatggtgttttcggtttttaagacgggagggatggggaaggttttgggtgaaggggataggcggggaaggaaaaggtgaagagaaaggtgttttttagggagggggtagatgtgtttaggatatgggatattggtagaattttaatttcgagtatatatataggtttacggacggtttttcgtttatttgttttttacgggtgtgttgtgtcggtttgggtatttgtttttttttttatgttaggttatttgtcgtttattttgtatattgttattagttttaagttttttagaatattttgattagggttttgtggtttttgttataggattttaggtttagacgtttgttcgattggaaaattgtttttagagatgtcgtggtttagagttcgttttgttttggggtggtttttggagttttcgttttttagtaatttatatggtgataggtatttatattcgttggttttaggaattttggggttattattttagcgttgtaaggagttggtagttttttttttattttttcggtttattttgtaggaattaagatattaggtgagtcgtttcgggaaagagatttgtgtttttacggcgttgtttttgcgtttatttttagttattttagatgtttttcgtggattagttgtattttcggcgggtatgtttggtttttcgtagtttggtttatatgatttttataggtaggtttttttttatgttttagttttttttttagttagtttattttagttttttttattgttgttggttgttgttggttagaaggttttttttttttttgtaatttaatttttatttttttttaaggttcgttttttttatattgattttttttttgttagttagtggtgatttttttttattttgattcggaagttgtttgtttatattatttttggttgggttgaattatatttttttttttattttttttaattattttttttttacgtttgtttgtttatttaaggttgtttaatttttatatatatatttttatattttttaattatattttaggttttttgggtattagggagggttatttttttatattttaggttagtttttatgtatatgcgtatttatgtatatatatatttttttacgtttatcgattcgggttatttgatggttttaagattagaatttttagtaaaattatttaggatatataagggggagattgataaatatagggaattagtagattgaggttttatttttcgagattgagaaatttttttttagagttaaaggattgttaattgttgtattaggatggttttaatgagtttattgttttggattaaattatagggttataaaattggtttgggagatagtcgtagaagtagttttagatggaggtatatgggggtaagggtggagttatatttagagatttaaggaaggggtattaataatttttatagtgtaaatggtgatagttgtataacgaatataattttaaattttggttttttttttcgttatagggttttcgttgagatacgagagtttttttttagaaattttattgggggttcgatattttttgttaggaattgagagtagagatttcgatttcgtaggtaggaggagagttttgtataatatagggtttttttttataagggtttattggaaagtggttagatcggttaagtcgtgttatttggatatttgggataaggaaggtttttggaggagcggtcgtagggaggagttgtaaagaggtaggggtagggaggttatatttattcggggattgtaggaggtttaacggaatatagtggatttagggagattttagtatgagtatgtgtttaaagatgtttagatgaggaggtgttgtgggggaggggggcgggaatagtaagtttttttagttttgtagatttagattttttttttttttgggaagtagggatgtaaagggatagagtttgaaaaagggtttttattattaagttgataaagtaattacgatgtttttagtttatattttgtatagcgttagtggttattggattataattttttttcgttttttcgtcgttttatattttttttaggtttagttttgaagaatagttattggtattttgtttggcgtttagttaaagttttggttttttaggaggtttcgttttttttatttagatagggttgattttaggtgggtcgtgtgggtagttgggtttaggatatttagatgttagttttggttttggttatggagcggggaggattttaggttggttattttttagtttggtttgatatttggatagtttgtttattttaatatagtttttttttttttcggtttattagagggttttgtttaagttagtttaggagttttttcgaggggcgggggttttaggtttcggtagaggtaggttcgttttttagaagttttgttttagagcgttggagattattgtgtgagtttttttttcgtttgttgtatttattttcgcggacgtaggacgtagagttttagtatcggtagttaagaggacgtaggaaagcgtacgtatttataggtttagagacgcggacgttagatttaggtttggatagagtagtttcgtaagttttaatatattttgtaaatttcgaagataggagagagttaaaatattttttttgttcgtacgtaggttttttttgttttttacggttcgattttgggaggcggatgaggatatttttaggtttggatgggggttatgggatattttattttagattttgttacgatttgggttgtgttcgttcggtgttttcggtttacgggttgtataatttggcggtttcgaaattggcgtgggggaggggagggttgtttattcgagtaggacgcggttgtttatttagtcggaggtgaggaacgatttttttatttcgttgtcgggtttaagcggggttcgagagtcgtcggggagagttaaagggaggggatcgatggattttttagagtgaaattgtgcgttttggagagtttcgaggtagtttcgcgagttttcgaggaggtcgttgtcgtttggtaaatataaataataataaaaggaaggaaatttaggcggtagtgcgtagaacgagtatagggttttgtgagggcgcgtagggtttacgcgggtgtttttaatagggttttttacgtaggcggcgcgggtacggggtcgggggcgcgcggcgtttttagcgggagggcgtttggattaggggtttcgtttttttttagcgtattttcgtttttttttagcgtattttcgtttcgcgttaggtttattcgtagggttttttttagtacgttcgcggtcgtagtagttagtttagtatttattttcgaagttcgaaatgattttatttagttgcgcgttgatcgcggggttcgatatgatggttggtgggtagcgggtcgcgcggagggtagcggcgaggaagcgttttcggcggggttcgggttttgcgcgttggttggggcgtcgcgttcgcgtttttgtagtgtagagttagtcgtcggaggagtttttaggttttttggtttagttgaatgaatgggggaggaaggcgggcgtcggttttttttcgcgcgttgcgttttcgtttcgttttcgtttttcgggcggattaggttttcgtattcgtatcggtttttttgtttcgtattggttgtttcgttcgtttgttaaggttaggtttggggggttggggttcgagtggtcgttgggggatagttttgggtatacgatcggagcgtttttttttttttcgtttggttcgcgtttaggggacggcgagagacgcggttttagttttttttttcgggcgtttcgttgcggttagatgtgggcggatgtggaggtcgggttatggcgaggagggcgggcgtttagaggggaagagattttttttttttttcgggcgtagggtttttttgtaggaggttgtatttgggtagttaaataaagttttttgttatcgtcgtcgcgcgttttgcgtttgtaagggttaaacggtagcgtacgcggttggtaggtaggatttcggtttgtgggtttaagagtcgaggggcgtagggcgaatatgcgagttttatggtattagcgagaggttattaatttttatttatcgagggtatttttgtagttaatatttttattacgattatcgtttcgggggttatcgttgtatttttttgggtgagttttggagaaggtattgttcgggagaaggggtatagggcggggatggaatacggttgttagagaagttagggacgggcgacgtttttttttttttataataagggttttttgagagtaggaagtagattttgttaggagtagacgttttcgaaggaaggtgtgaaggaaggagttaggtagtgagtgagtagaaagggagttgttttaagggttttttttttttttttgggttttaatttgaggtttagttttttttttaggttagcggtttttatttttaaattatattatttataaggtaggtagggtcgaggggttggggtagatttggggatttgggttagatatagaatttgagaagtaataggtttttatttttaagaagggttttttaggtttgttatttataagagagagaggcgttttttttattcgttttggaaagttagaaatttatttttgtatgttttttttgttatttcgttttttagattttcggtttttgtttagagttaggggttatgtgagaatttatagtatggaataatatttttattttcgaagtagtaggtcgtaacgttataattgtatttcggttttttgaatgtgtggtcggggagcgtttgatagtttattttgggtttgaggtcgttcgttgtttatttgtttttttttattttttttgaaatattttaaatgtgtaggagtgttgagattttttagttattttggagaggcggggggtagggggttttttgcggaaaatgttttaggtttgggtggttttttaagtagatgaaattaagttttttttttttaagaaaagtaggtatttttttttttatgttttggatattttgaattatttttaattaagtgagtttgtggatatgggaattgtaaaattatagatattttagatgcgtgtatattttcgtcggtttgggagttcgggttttagaaatgtagttattgttgttattaatagtatttcgtattttttacgttaggttagggtatgttttgtttgaattttagtatttgggtttatcggatagtttagtttttattgggttatttgtttacgtcgtatttggggatttgggggtttagtatttaagaaatttagtttaataatatagtttttttgggaagatgtcgggttcggtataatagttattttaagttatagtattattttcgagtgtttttttaaaaagtatttggtgagtgtggatatatttatgtaattgtttttttttagggttggtatggagttttattagattagtatagggttagttaattgtatattttttatttttacgtatagtgtagtaaatatatttagttttttggggagcgtcgttagggtgtacgttttattaaaatgggaatttaagggataatggtaggagagtagttagaaagtgcgtatgttttcgtgattgtgtttagagtttatcggttttagttttagttattgtttttttaatgtaattatttagagttatatgattaggtttagaaatttttaggtaaggaggtttttcgagtttttttaggaaatttaaattagggtttggttatatttttagttaggaagtttattttcgtatttaattaattgttttaattgtatattatttattttttttttttttttgtttttagaggagatgggaaatagttgggtattattttttaagttataattattttttttatatttaaggataatttagttgttttttggtttttttttttttagtttaaattatttttttttagttttttaattatatttcgagttgttttttgattatagttaagggttgggtttagtttggggttttaggattttaatgaggttttattgttataggatagtgaggaggttttttattttttttttttagggttttagggtttggatatatagttttagaaggggtattgggtagagaagatgtacgtcggtagtagagaggaaattgagttgaaatttggtaagaataaaagaattataaaggtttgtgtatttagtaaggtgtatttttttacggttataaaagaaggtaagatcgattgtaggtttggttaaagggatcgtttgcgtttttagtgtataacgagatttatagtgggtcggtgattttttttaaaataaagatatgtttatttggaattttaaatgtgatttgattttgtttaagggtttttgtagaaagaatttaggtaaggattttaagataaggtgggttttaaatttaatgttgtgtttttttaagagatagaaaagaaagtatagagatatagaaaaaggttttgtgaagatagaggtagagatcggagtgatgtagttataggttaaggaatatttggggttattagaagttggaagaggtaaagaaaggtttttttttggagtttttagaggaagttggttttgttggtattttgattttagatttttggtttttagaattgtgagaggatatattttttttgttataagttatttagtttcgatagttgttatagtagttaggagaaattcgtgttttatttttatttgtattatgttttgaggttaaagttttatatagtaaagatgtttaagtaattataaattttgtgggtagtttattcgtttagtagattattgttttaagggaagggggatggggatagggaagagagttataggaaatttttgtacgtttttttggaaatgggaaggagtaggtttggagagaaattttataggttaggtttcggggaaatgaagtttataaagcgtgggaacggagtggggaggaaatttacgaggaagtagcgtttggcgtatatatttatatttatgatttttttttaggtatagtttttatggagaggtttagttggtagggaagtaaaagaggttcggagagcgaaggaaggtgaggggtttttttttagtaatattgaggttttagacgggatattttattaggtggtaggttgtgtttttatagatagagattttttaagggtagggtttagatggttttatttttgcgtggtttgatataaagtaggttttttagagttgtcgagttttgggttcgttagtggtagagttttttatagttttttaagtttttatagttttttattttaggaaacggtgttattatttatttagttgtttaagttaagttttcgggtattattgttgattttttttttttttttatttttagtatttaaattatggtgcgtttttatttttagtttttttgcgaattagtttgaattttttttttttagtagtgtgttagttaacggttaataatcggttatttggggttagtaaaagtaataatatttagtttttcgatttgtagcgtttgtttatttttgtggtgttaatatttttgttttggttaattttttttttttttttttttttttgatagggttttattttgttattcggtttggagtgtagtggggtaattttggtttattgtaaattttattttttaggtttaagtgatttttttgttttagttttttaagtagttcggattataggtattcgttattatttttggttaatttttgtatttttattagagatgaggatttattttgttggttaggttggttttgaatttagatgatttgtttgttttggttttttaaagtgttgggattataggtatgagttatcgtgtttagtcggttaattttaagttatttgtatgatattattggaggtgagattgagaagagatgtttagttattacgaatatagtgtttttattatataaatataattttaagaatataatcgtaataggatagataatagttaaatgttgtaaaaaatttaagaggtgatgaaagttgtgtatttattattttttgttttaaatataattatttataagtaattttttaatgttttgtttaattttttttttataatttgtaatttaatttatattgtaaaaatttattatttttttaatagagtaatgtatttttattgtgataaaatatatgtaatataaaatttattatttttggttagttattatggtttacgtttgtaattttagtattttggaaggttaaggtgggtggattatttgaggttaggagtttaagattagtttggttaatatggtgaaattttgtttttattaaaaatataaaaattagtcgggcgtggtggtaaacgtttataattttagttttttgggaggttgaggtacgagaatcgtttgaatttgggaggcggaggttatagtgagttaagattacgttagtgtattttagtttgggcgatagagcgagatttcgttttaaaaaaaaaaaaaataaaaataaaaaagataaatttattattttaattaagtttttatgttagtgatattaagtatatttatattgtatatttattaatattatttattttcgaaattttttttaattttttaaattgaaattttgtttttattaaataataattttttattttttttttttttagttgttggtaatcgttattttaatttttttatgaatttgattttatataagtgaaattatataatatttgtttttgtgagataggtttacgtagtatgaggtttttaaggtttattatttaaggtttatatgtagtgatagaatttcgttttttttgaaggttgaatgatattttattgtgtgtatatatattttgtatatttattttttttatatttgagtaattgagagtaaagttgttataaatatgggtgtgtaaatatttgtttaagtttttgtttttattattttattattattattttatttattattagtattattattattttagatagttttattttgtcgttcgggttgtagtgtagtggcgtgatttcggtttattgtaattttcgttttttagatcggagtaatttttttgttttagtttttcgagtagttgggattataggtattcgttattatgttcggttaatttttgtttttttagtagagatggggttttatcgtgttggttagggtagtttcgaatttttggttttaagtgatttattttttttagttttttaaagtgttgggattatagacgtgagttattgcgtttagttattattttagttttaaatattatagtaatttttttattgttttatgagattttttgagatagtggttttagggattttatatatatttgttcgattttgtgtaatgataaagcgtagttttttttgtagaatggtagagtcgggagatttttgatggggtatgagtttaaaggggtagaggggacgtttagaatatatatggattttttatgtgcgttttgttagttattaagtagatttgttttagtttcgatatgtttaggattatagatagtgtatggtttttatttgggttaagttttcggaattttttttttttttatattatttgtattgggagtagttattaggttgtggattattaagttttttttaggttatttgagtttgtatttttttatttagtttgattgagtcggtgtgtagttattatattttattatattttttgtttggtcgttttaatgtaattataaggttttatttaaagaagtatatgattaatttgttttttagattttttagtgatttttttagtttgttttgtgtagaatatttatagtaaaatttgattatagcggtttgagtttttatttttaaggtaggggattttttaaataaagtattagtgttttaaatttatgattttttaaggaggtttttggtttttagtatagtaaatgttttgttttatggtttttcggttttttatttttattttattcgagtttttcgtttcggtatttgggattgaattagtttggagttttttagttttgttgtttgttggttttgatgatattattagggattgtagtattgtttggattttttgttgttatattttattgtaataatatttaatttgatggaattttgggagtaagtggtaggggtagggatggtggtggttaggggttgtatatatataggatagaaggattgaaggattgggtggaaagtatgatttttttaagatgatttttttttagtagaattttggttgtgttttttgaatagtatttgtttatttgtatatttggtgagttttgtgattagtaaatttagatgtttgggaggttattagcggttttgttgaggtataatttagatatgatagtttatgttttttttttgatttttttttttttatatagttttatgattagagcgttttttttatttttgtttttattttagtttcgtaagatatagtcgtgaaatggttaaagtttttaattttttagtattcgtttgagattggagtataaaaatgagatggggatatagtattttatggatattagtgatggaaaaaaattttttgattttttcgggagttttgtaaagttatattaggggataagaaggagtggttagtttggtatcgatttagttttaaagtagttagtgattaaagtatatagttggtatttttttatttttagggtattaggaggtttggttagaatttatgttagttaggagaaataggttgtttttggggtttttggtgttttggtttttttattgtttttttgaagaaggtattttgttttgtggggtttgaggttggaggtaatttgttatcgatgtagtgtagggatgagggttgagttattagtttgttttagttttacgttagtaggaataatagggatttaagtagagaagaaagtatttatttttaaagttattatagtgattgaggcgacgtggtttttagggagtttttttttttgttggttttttgtggatcgcggttttatgttttaataatgtttttgtttatttcgtaaggtttagtaggtggaaggaaagagggtggaggttgggagtggcggtttggtaattcgggaagggtagggagtaggaatatgtttttttttttttgtattcgtttagaaggttttatagggtttgttttgttatttataattttagggagatttttttttaatgtttgttttataaatgtttatttattttatatttgaatatttttagttatagggagtttagtatttatttatgttatttattttatttttggttgtttaaaaaagaggaaagagagagaaagaaaagataggaaagatagagaaagggggaaagagagagagaggaaagaaagaaagaggaaagaataagataggaaggaaagaaaaaggaagggaacggaagggaaggaagagagggaagaaagagagaaagagagagaaagaggtataaataaggtaggttttatggagtagagatttaataagggagtaaaatatatttgtagttaggttgtagatggatttttataggagcgtatatttattttatttttttcggaatagaaaagtggaaagaagatgtagcggtgtgggtgggtggcggttttttttgggggtttggaatgtggggtattagtttttttggttttgagaaggagattaagattattaatatttatagtggagatcgaattatataagggttggggatatcgttttttttgtatttttaataaagattcgatgttttaattatgggaatttgtggaagaagaaataaaattggttttggggttttttagagaattggttttttatttagtggtggttgtgaagaaatttttggagttagttttagcggtttgggtttgtatagttgagattgtttttggaagttgagtggaagtggggagtttttaggtatagttgggttttgttttttattttagttagtagttttaggatttttgggtgttttagagttttttttagagggtaaatttagagtatgagggagcggggagatgtttaatattgggggatttttgttcgtttttgtttttagtttcgttgatttgaatagggaggttatgggtgtttaggggtagaattgtgggttggtaagtttttagttttggtttttttttgtttttttttttttattgttattgattatttttggttatatgttgatatttttataggatgatggagaagagagaagaggaattttttcgttttgtttagtatattttaaagaggttttagtgtaaaggtatcgacgtttatagttaaatgtgtgtgggggttttttaggagtgggacgtttttatttcgttttagattgttatgaatcgatagaaggttttatgttattaaatatattttattaataaattattttaatatttagtaaaaaaataaataaaaatgtatgtatttcgtgttttgtagtgtttttatgtcgtatttttttttgtatttgagtttcggttcgcgtttttggtttgtcgttttgggaatagaacgttttgcgtgggaggtagataggaagcgcggggtgcgttggttgggtttttttagataatttggtattgttttttttagataatgaaattttttttattttgagtgtttttggaagttagtcggtagttagattaatttaaatgaattatttgttttttttgtgaagtgattttagggatttaatgggtttgttattaatatagtttttttcgtattttgttttttttttttatttttttttttttgtatgagttattggttacgatgattcggtttagttaagggatttggttagttttggttaggttatgtgagagatagtataaaggattaaggttgtcggaattaggttagaggttgagggttatacggattttttggagtgtttgtaattggggatttttaaggttgttttttggttttggggatttgtttatttggggatagttttaagggagatttttaaaagtagggagttaaaagggtgaattaatatagaaatattgagggttagggagaatttgaagatgggttcggttgggtatagtggtttatgtttgtaattttagtattttgggaggttaaggtgggcggattatttgaggttaggaattcgagattagtttggttaatatggtgaaatattatttttattaaaaatataaaaattagtcgggtgtggtggtaggtgtttgtaattttagttatttaggaggttgaggtaggaggattgtttgaacgtaggaggtagaggtggtagtgagttaagattatattattgtattttagtttgggtaatagagtgagattttattttaaaaaaaaaaaaaaaaaaaaaaaaaagataggtttaaggtttggagagttagaagttatttttttatttttgggtggtttattttgagattgtattacgttagagaaagttgcgggagtgtttgtttataatttataagtaatattgttttttttttttattagtttttggttttagtaggtttttgattcgtgttttttttagggttttgggtttttttaagttggattttcggttgttggtgggatgattatgtgatttgttatttttttgtttatcgttttgggtagtttttgttatttggtgtatatagagtggagtttagtaaggtcggggtcgtcgattttttgttagttatatttgtttttttttacgttattttttttcgttttggttatgtttaggggtttatatttttttataagttaggtgttagatttttgtgtttgttttattttgttttttttgtttggtgggttttttatattttttttggtttgatttaggtttgatttgtttttaggttttagtttagaggttgttttttttaggaagtttttttgggatcgttagatgaagggatttttttttggattttttttttatttttatagttttaggaatagtttttaatttaggttttattgagttagtgtggtatttaggagagttataagcgtgtgacgaacgtgttgaagtttttttaaaagttgaaggagttttgtgaatatatagtagtattagtttagattgcgaaggtataggggagttagttttttttagtttcgtttgtttttggttttttttttgaggaggtgggagttagttagttgggattaggaggtgggttttatggagtagagatttaataagggaataaaataaattagagaatttttttgttgtaaggaatttagataaggagtatttagttagaggaggaaggaagagatcggtagtagattttttttgttttagtagttttgtaagttagatgggttaattttttagtatagttgttttttagtatagagaaattttttatttttagtaatagggtgggaatatttttagatagggttacggttattttggttatagggattacggagtttgagtttttgtggtttgttttatttatgtggttatagattttgagtatatatttggagttatagagtttaaagggtagggtagggtagggaatttgtttgattggtgaaggttattttattatttggagtataggtttttgtttttaaatttatatggagttttcgatacggggtatcgattttaaggaggtgaatgtggatatttaaggttagtgaatggttaggtgttaatatatcgataggtttttggttttttttttaatattgagggtaggaaataaatggggtttatatggtgtatatggtttttagagttagtaaggtgtgtaagattcggtagttgagaaaattgattatttggtcgggcgcggtggtttacgtttgtaattttagtattttgggaggtcgaggcgggcggattacgaggttaagagatcgagattattttggttaatacggtgaaattttgtttttattaaaaatataaaaaattagtcggacgcggtggtaggcgtttgtagttttagttatttcggaggttgaggcgggagaatggcgtgaatttgggaggcggagtttgtagtgagtcgagatagcgttattgtattttagtttgggcgaaagagcgagattttattttaaaaaaaaaaagaaaagaaaagaaaagaaaattgattattcgattatgaataagttagaatatttatttagaaaaaaaaaatagttttgtttaattggggatttaaaattttaggatttatgttttttttttatagagttatattatttttttaatgtttattttcgattttatttgtttgttaagttttaggtatttagaatatagtatgatagtaagttttgtgatttttataggtttttttaatttattttaggtatagttatatttttagttttgagtagtagggagtgatatgtagatggttatttagatagagaaagatttttaaaaggagggtaggttttgtttcgtaggtagtatttattgatatagatattagtaggtaaattttttaggaagatttttattaagaaagaacgaaagaggtttagtgcggtggtttacgtttgtaattttagtattttgggaggttaaggcgggtggattattttaggtaaggagttcgatattagtttggttaatgtggtgaaattttatttttattaaaaatataaaatttagttggacgtggtggtgggtatttgtaattttagttatttgggaggttgaggtaggagaattatttgattttaggaggtagaggttgtagtgagttaggattatattattgtattttagtttggggggtaatagagagagatttcgttttaaaaaaaaaaaaaaaaaaaaaaaggatgaaagataaataaggttgaaattggtaggttggtatatttttaataatttattttaggtcgggcgtagtggtataatgttagtattttgggaggtcgaggagggtagattgcgaggttaggagatcgagattattttggttaatacggtgaaatttcgtttttattaaaaatataaaaaattagtcgggtgtggtggcgggcgtttgtagttttagttattttggaagtttaggtaggagaatggtgtgaattagggaggcggagtttgtagtgagcggagatcgtattattttacgttagtttgggcgatagagcgagatttcgttttaaaaaaaaaaagaaataaaaaataaaaataataaaaaaaaaataatttattttagtagggagtaggaggtaaggtttgatatgtagtgtttgttaatttttgtggtgtaaatatatttattgtggtaaattttaagttataaataggatattattaaatatagagttgggaaaagatatgtatattattggataaaacgtttaggtagttacggtttatttttttttgggaaggggggtatgtttagaatgttttttattatggagaatgattgtggtaaatagggtttaattggtaggttgatttaattaattgtttattgatgtgatgtggggtaggtttttgaggttgtttttatgtttagggaagaaggtggttatgtggttatagatttggttttgggtttgttttttttttttttttttgagatagagttttgttttttttttttaggttggagtgtaatggtgtgattttggtttattgtaattttcgttttttgggtttaagtaatttttttgttttagttttttaagtagttgggattataggtgtttattattatgtttagttaattttgtatttgtagtatagatggggttgttggttaggttagttttaaatttttgattttaggtgatttatttattttggttttttaaagtgttaggattataggtatgagttattgcgtttattcgggtttgttattttgaggatatatttggagttatgtgtttatgattttttttttattttaaaattttgattttattttattgtttttagagataggttttgttttgttatttaggttggagtgtagtggtgtaattatagtttattgtagtttcgaatttttaggtttaagcgatttttttattttagtttttcgagtagttggggttgggtttataggtgttattatatttagttatattttatatttttttgtagagatagggttttgtaatttgtttaaattggttttaaatttttggttttaagtaatttttttatttttagttttataaagtgttgggattatagatgttagttagtgtatttagtagttattatgattgattggtgacgtttgttttagttttaggatgaaagagtagtagtattttagttaagtatttgtggtttttgattggaagacgttttttttgttttttaagtatagtgtaaatgttatttttttggtaagtttttttttaattttattttttttttggtatagggtttgttatagttttgtttatataaagagagttattagtgtatgtggtatagatgttagttgtttttttaatatttgagtttttttttttttatagtaattgaagttttggttgtgtatagggaagtttagttgaagaatatattgtttagtttttttgatgataggagcggttatataattgggttttggttagtgggaaggagttgaagtgtttaatttttaggttatgtttttaaaaataaagagggatatttgttttttttttttttttttttttttttttttttggttggagtgtagatatgacggtaggagttggaattattttagtttaagagatggaagttgtgtgtcgaggatgtattaaaggaatgaattaggttcgggttgttttgggtttttataacgattgatatttggattgggacgtgggttcgagtgttgtttagtttttgatgttttagtttttgttatatagttagatggtgttttgattaatttaaggtatggttattattttatttgtttggtagggtaggggttttatttttatacgttgagtttttggtagaatttggtgtaatatatatagttaaagtaaaatgaataggttattttaattaaggtttattttgtgggttggttttggtatttggttttaatttttattttattttatttatttattatttttgagatagagttttatatttgttgtttagtttagagaggagtggtgcgatttcggtttattgtaatttttattttttaggtttaagtgattttcgtgttttagtagttgggtagttgggttttttttgagtagttgggattataggtgtacgttattatgtttggttaatttttgtattttttgtagagatggggttttattatgttggttaggttggttttgaatttttgattttaagtgatttattcgttttggttttttaaagtgttgggattataggtatgagttatcgtgtttagttagttttggtatttggaattggaaaataatagtttgagttttagaggggataaatataaatatgaggtagaaggaatagtaagtaaatacgtgtttagagtaggttgggttgtttatatttttaaaatatcgttaggtgttgaggtttgggttttgtgttagatttttgggtgtagatttcgtggggatatttattgggtagtgggatttttggtaagttatattatttttttgagttttcgttgattaagttgtttattgagaataatatttagattgaaaggatttataataatatgtgaaaagtgtttggtttaaaataggagtttggtaattggtagtttttattatttataatatatagtttaacgttttcgttttataggaatgaaaataggatttagataggtaaaatgatttgttgagggtcgtatagtgttaatgatagagttaggattagggtttggggttttgattttttttgtagtattttggttttgtgagaagtggttttgggtgaatataaggagtgaggagttggtgagaaattttgaaaatgaagttgggtgtggtggtggatgtttgcggttttagttatttaggaggttgaggtaggaggattgtttgagttcgggagttggaggttgtagtgtgttatgattgtattatcgtattttagtttaggtgatttagtaagattttattttagaaaaggaaaggaaaggagaggggaggggaagggagggaatttttgatagtgattttagagataattaggatgatttgaaattattttgaaatgtattaaaaaataaaaataaaatggatttatggttaggcgaaggagggatagatggacggtgaggtgataaagtaggtgtagtttggtgttagtggtagaatttaggtgatggttgaatgtgttttttgtaaaatgtttttaatttgattatgtgttttgaatatttttataatagaatggagggaagagaaaggtaagagggagttattgtagttgttgtagtaggagtagattttaaaatattatgtattagatttttagttttgtttttgtggatgtgtttttgtttttttttttgggatttaaggatatttaatgagcgtatgtgtttttaagtttttttgtttttttatttgtttttatatttggaagattttataggtggcgtgggttagttttttattttgttttttgtgtttttagtgtatgatagatattgagtgagtgttagttttttttttcgatattttgtttgtttgtttagagaggtttttttatagtttagttattaggttgatgtttttggacgtttggtcgatagtttttttagttgtgttttagtgatttggtaggtgttttgagttataaataaggttattagtggatgtttttaaagttttttttattacggcgttttttttttttttattaatagttcgttatgatagttagtttgtatgagtttttttttagggttgtgttttttgaggttgtttagcgtttggtttgttagagtttattagatagggtgtttattttttttaggtttgagtttttatttagagaattatttatagaaggataatggagaaaggtagttggggtattaaatggagtgtgtttgtatgtggggggggaggggagggggagggaaagtaggaagagaagatataagaggagaaataagaataagaggaaatatagaaggaggaggagtagttttttttatgggggtggattttgtgtttagttttttattaaggatattatatttattatttcgtttggtttttacgaatatttttaaggtcgtttttttttggtttttatttttttattaggaagcggaggtatagagtgagaaagagttgtttaaggtttttaggtagtttacggagttattgggagttatatttaattcgtttaattttacgtttttgtttttagttattataataaattattaaggttttatagttataggagtttagttcggagtttttatcgggttttttaaggtagggagatggggttggaggttatgttaggtgtacggtgtttagagttgtttaggaagtttcgcggtgcgggttgggtattaggtagtgtttgtaggatggagaaatgaatgaggttgagatatagtgtcgttttttttaaacgtgattttttttgagtttttgtgattggttatttgagagggtagttttggttttttggcgtttatgttcgggtttagagatgttttttttagttaggtttttttttgaggatggaaatttagaattttattataggaggaagagttgggagtattttattttttttttttttttgagacggagtttcgttttgtcgtttaggttggagtgtagtgacgcgatttcggtttattgtaagtttcgttttttgggtttacgttatttttttgttttagtttttcgagtagttgggattataggtattcgttattacgttcggttaattttttgtatttttagtagagacggggttttatcgtgttagttaggatggtttcgattttttgattttgtgattcgtttatttcggttttttaaagtgttgggattataggtgtgagttatcgcgttcggttagggagtatttttaagatttttgcggagggttgtttaggtttaagttttttattatggaaggttttttagatgcggtagttacggtgtatgggttgagggtttttatttattaagaagtaggagtatttgatgtatatttagtttacgatttttatttatttgggggttgtgtttgtagttacgtgatataagggaatagttatagtagtgggttataaagagagtgtgggttaatgtgtaggggtagaattttgatagttttttatgggttggtagtagggaggggtatatttgtataaattttatacgtatagttttttatatatatgtggttgataattatttatatatttaagacgggatttggcgtatagtttattagtaataggcgttggtaatttttagttgtttttttgttgcggcgtagatattatttaaggtgggatggagagagttattgtttttaaggttatatattttaaagggagatgttgggttacggaatgaaaataggaggattagttagagttattggttttgagttatataatgggatatataggtttatttattttatatttttattgagtaattataacgagttaagttgtatagattatttaaataatcggtacgtagaaaagtattttaatttttttttggttttgacgtgatgggaagaatttggatttttggagttatagagttggatggaaattttggtttagttaattattggttgggggagttcgggtaagtgatttaaggtttttgagtttgtttttttgtaaaagagtagtgttcgggtttgttacgttaggttagggtaagatgattgaagagtaagcgtttagtatcggttaggggttaacgtttttaaggacgtaaagtgtaataagtaggcgttacgattgtatcgttttttattgtttgtggtaaatatataagtaaagatggtttcgcgtttgcgttgggggaggtagggaattggttttaggaggacgttggtttttttagttgttttttttaaagttttttgggaggagaaatgatttattttagttgttgggagttttaatttataagtaggtttgtttattcggtagcggtcgtatgtaggtaggaggggtttcggtagtttttaagagtgaggggtcgtttagtttttttttagttggaaaggaggttttaggttgggtaggagtatttggggaaatttagtttttggagttaggttatattagggagatgaggttgttagaagtttttttggtgtttatagtaaaatataattaaagtgggatttagattttaattagtttaaggtttgatttatattagagggaaattagcgtttgtcgtatgagtgagcgtttatgtgcgtgtaaggtagagatagattttgggtaagtttttttatttttttacgtttgtttttttatttataaaacggggtaatattatttattttatagggttgttatgaaataaatatgtattaatatttgtaaagtgttgagaatagtatttggtataaaataagagcgatagatttgttaaataagtaaaaaataagatataagtttaaagtagagtttggtatatcgtgagtattaagagttgtgttttttgattttttttttttgtggagatttttttattagaagtgggagggattgtcgaggttggagttttgttttagggatttttgtggggagttttttagtttagagggatttgttttacggattatatttgtttcgggttttcgtgtttttgtgtatgtgtgtatatatgtgtgtatatatatgtaatgtgcgtgtgtgtatttttatggatttgtgataatttgtatatatatgtttagaatttatttgatatagtgttttattaagatgttggagtttcgatgaatggattgcggggttgagatattgtttttataggaagttgttttagtagtaagttttttggtttttatagataattaaaaagaatggagtttgtttttattttttgttttaaaaatgatgtatagtgtgtggggtttgatgttggaggtttttttagtagatatatttttaataatattatattttgaaatttaagttgtcgtaaaataagataagtaaagatggtattggtagggatttttgaggttttttttatgtatttttgaataatttttatatggtttttgtttgaatgtttttaggtatggggaatttattattttgtgaaatagtttgttttatcgtttttaagtgaatattgtgagaaaaatatttttttttgtaaagagttaagttttattcgttagtattttttaggtatttggtattagttttatattttgggggaatttaaaataaatgttttttttttattagataatttattaattatttggagatagtggttgtagttttttgttttatgtagttattttatttagtttttttttggaatttttgacgtgaatataagtttttttgttacgtaggttttttttttgggttttttatttatttgcgtatattttggagaggtcgttcgttttgtgggtgagatttattgtgggttgaattgtgtttttttaaaagatatatgtaagttttgattttttagtatttatgaatgtgattttatatggatatagggtttttgaagatgtaattgggttatttgagggtatattgaattagagtgggttttaaatttaatgataggtgtttttataagatagaggtaggttgggtatagtagtttatgtttttaattttagtgttttgggaggtaaagttttattgtttgagcgtaggagtttgagattagtttgggttttcgtttttataaaaaaattaaaaaattagttaggtatggtggcgtgcgtttgtgttttagttatttggaaggttgaggtgggaggattgtttgagtttgggaggttgaggttgtagtgagttatgattacgttattgtattttagtttggaggatagaatgagaatttgtttttaaaaataaattaaaaagataatagagagggtagtttggatagagatataagaagagatatagggtgaaggttaggtggggggtaggtcgagttgtaagtcgaggaatattaggggttgttggtcgtcgtagagttcggagaaaggtatgggatagtttttttcggaatttttaggaggaatgaatttttagatatttcggtttgggatttttggttttagaaattttagggaagatatttcggatgtttttgtttttgtttttgtttttgtttttgagacggagttttgttttgttatttaggttggagtgtaatggcgcgatttcggtttattgtaatttttatttttaaggtttatgttatttttttgttttagttttttgagtagttgggattataggtatttattattacgttcggttaattttttttttttttttgtatttttagtagagacggggttttattatgttagttaggatggtttcgattttttgatttcgtgatttaatcgtttcggttttttaaagtgttgggattataggtatgagttatcgtacgtggtcgatttcggatgttttgagttattttatttgtggttttttgttatgatagtcgtaggatagtaatatagggttttagtagggtggttcggtaagggttttttttttacggtagtttttattttgttttatttgtagggttatttagatgtttatttcggttttggttagtaagtgttagtgtatttttttacgtttagtagtaagggtagtatcgttgttgattaagtatttgttatgtcggggtttttgtgtggttttggggttttttttttttgtttatatttggtagtttagtttttttttttgtattttatttgatgtcggggttttgggtaagtttgggggatttgtgttttattttatagattttttagttgattttattagtttttgtatagggttcgtttgaagggtcgttgggttgggcgttaattagagtttttagtagtagttttttcggttttttgattttggtttatgttttaggggtagggtttttaagggttttggggtcgtttttgaggttagtttttttgttgatcgtagtttatatagaggagggtttaattttgagtgtggtcgttcgtgattttgagagatgtttagagttgtagacgtgttttttaagttttttagagttcgggataggagttatttaatgtttttagtgttataggtaaaatttgttttttttaatataaattgtttttagttttatttaatgttttttttaacgagtagtaataaaaatatggttttttgttaaaggtggggtttatagttttttagaattcggttttttgttaggtttaggtataatttataggagtgttcgtttttgattcgtgtgtgtgtgtgtgtgtgtgtgtgtgtgtgtgtgtgtgtgttgtgtgtacgcgtatatgtgtttgcgtaagtttttttatgtgtagttttgggaagggtggagaggtttacggaaattttttttggtatttagtaagttagaaaaaaggaaaatgagatttgtgtatatatgtgtaagtgtatatatagtatataggtatatatatatatatatttagtatatattatataggtttatacgtgtatatatgtgtaggtatatattatataggtttatacgtgtatatatatgggggtatatagtatataggtatatataggtatatatatttttttgtaggaaagtttttttttgttttttattttgtagggtttttaggttttatgaaataagattgaattttggaagtttgataaaaggtttgtttggagtattttggttatttttattagtttttttagttgtggaaggtatgtttcgtggtatttatttattttttgtttttatttttattttcgttttcgtttttttttttttgtttttttagtttatatgttgtttgttttaattttaatttttgtatttggacgggaattattttttttgtagaagggtgtaatgtatgtggggatatatatatatatatatatatatatattgtattggaggagagaagagaggtagagttttttttagatttagagttttagcgagtgacgggattttttttagagaatacgtgtagaagtttgcgttattggaagaagatattattttgatttatatttttttttttttttttcgttttttttatagagaaggaaaggttttagtaaatagtggttatgtgggttttttgtatgttattggtagttttttagttaggattattttttttttatttttggaagtataagaatagagagaagggtgagtttttgtttttgggggtttttttttgtatttttttggagttaattttagggttgtgggttgtataggaaggagggtttaataggtttttcgtttaattttgtttttttagtgaggagtcgatttattttgtttgtaaaagatgttggttgggatttgatgttgggtaatttgaggagaagagaagggggataggggttgaggttaggtttttggttttgaaatagttataatttttggggtagagtttaagggtgttaggttggagattttatattcggttagttggtagttattattttggtttagttagtggtttagggtattatagttatttagattaggaattttatttttttggattgtattaatgaggaaggttgagtttgtaggttttatatatttatggtaattttaaggtagagaggttattgttaattgagggttacgggtaggagttttgtgagtttattagtaagtttggaagattaaggtttttggttatagagagtagttgttatttggttaattttgtagaaaatattatagttttggataaaatatttgaaagaataaaataataatagtttggagttagtatagaatattttaagtaggtagaagttggagtagagtttatatttgatagaggggaataaaattagataagtttttggtttttggaggtttttttgtttagaggtaggtattgagtaattaaatttggataaaaagttttaaaagtatttagggaaaaataatatgtggtttataggggaatagttagatgaatgttgattttttgatagaaataacggaggttaaagatattggaattttatattttaaagttttgaaagaaaaaattgataatttagaattttataattagtgaaattatggtttaagaatgatagtaggttgggtatagtggtttatatttataattttagtattttaggaggttaaagtaggtagattatttgaggttaggagttcgagattagtttggttattatggtgaaattttatttttattaaaaatataaaaattagttgggtatgatggtatatgtttgtagttttagttatttgggaggttgaggtaggagaatcgtttgagttcgggaggagaaggttggtgagttgagattgggtaggagttttgaaattatattattgtattgtagtttgtggggagatagagtgagattttgttttaaaaataaaaataaaaataaaaaaagaaagaatgatagtaaaataaagatttgtagataagtgaaaatgaaagggaattagttgtttgtaaatttgtattataaaaatcgtgaagtaagttttttaagattatgggaaatgagattagatgggaatttagttttttaggaaggaatgaagagtataggatatagtaaatatatgggtaaatagaaaagattttgttttatttttaatttttttaaaatgtatggggttgtttaaagtaaaaatttttttattgtattgtttagtttataatgtgtatggatgtagtaaatatttaataattattatatataggatggaaagtggtaaatgaatttataggattgtttagtttttatattttttttttatgaagaaaaataatgttaattttaagtagattgtgaaaagttaagaatgtgtaatagaatttataaagtaattattaaaatagtaatataaagagatataattaaaaagttaaaataggtcgggtttagtggtttacgtttgtaattttagtattttgggaggttagggtgggcggatcgtttgaggttaggagttcgaggttagtttggttagtatggtgaaatttcgtttttattaaaaatataaaaattagtcggtcgtggtggtaggcgtttgtaattttagtatattagggaagttgaggtaggagaattatttgaatttaggaggtagaggttgtagtgagttaagattatgttattgtattttagtttgggtaatagagtgagattttgttttaaaaaaaaaaaaaaaaaaaaaatataaattaaaatagaattttaaaaaatatttaattaatataaaagaagttaagaaagtaagatgaaagaaataaatattaaagagtaaggtagtagttttaaatttagttatatttataattatgttaaatagaaatagtttgaatattttaattaaaaggcggaggttgttagaatgaataaaatagtaagatttaattatatattatttataaaagatgttgttttagtataaatataggttgaaattttttgtttggaaaaagatatattgatgttgtttgaatgatgatggagttatgttttgataaatttattataagtggaaaataaatattattttaaaaatgtatttaatatatttaatttatcgaatattttagtttagtttagtttattttaatatgattagaatatttattttagtttatagttgagtaaaattaataaatataaagtttattttataataaagtgttgattattttatgtaagttattgaatattgtattgaaagtgagaaatataatggttttatatatatttaaagtatagtttttattgtatatatattacgttcgtattatggtaaagttgaaaaattgtaagttaaattattataagtttttttataagtttttttagtttttttatgtattttaaatagtatgtttaagaaggttggagaggttatataaatattaataaagttgagtttaagataaaattattacgagataaaggaatatatttattatggttaaatgattagtttatcgagatattattataattataaatgtgtatgtatttaattaaaggagttttaaaatatatgatataaaatttgaaagaattaaagggagaaatgggtaattttataattataggtggagattttttttttttttttttgagacggagttttatttttgttgtttaggttggagtataatggtgtaatttcggtttattgtaatttttattttttgggtttaagcgatttttttgttttagtttttcgagtagttgggattataggagtttgttattacgtttagttaatttttgtatttttagtagagataaggttttattatgttgtttaggttggttttaaatttttgattttaggtgatttattcgttttggttttttgaagtgttgggattataggtgtgagttattgcgtttggatgtatagttggagattttaatattattttagtttatttaggatgttaaaataaaatgttttaggttgggtaatttataaatagattgtagtgtttatagttttagaggttgggaagtttaaaattagggtgtttagtgtttggtgagagttagttttttgttttagagatgttttttttttgttgtgtttttatatggtagaagggattaattttatttacgatgattttgtttttatgagttaatatttttttgatgttttaatttttaatattattgtattagagattaagttttaatatatgaattttgggggatataaataggtaggttatagtaaatattatttttttaatatttgagaaataagtattagataatttgaagaatattggtaattagtaattgatttaattagtagttataaagttttatatttaggaagtttagaatatatatatatattttttttttaagtgaaaatagtgtatttattaagatatatattttgggttataagttttaaattttaaaagtatgtaaaatatgtttgtttggttaaagtaagattaaattagaaattaatagttttaagatatttagaggagttttgattatttgtaaattaaataatatatttttaaataatttatgagttaaagaggaaattataagaaaaattttataatattttaaatgaaatgataatgaaaatatagtatattaaaatacgtaggttgaagttagtgtttagagggaaattgtaagtgtttatattagaaaagaagtaaaaaaaaaaaaaaaaaaaaaaaaaaaaagatttaaggatttgttttaagaatttggaaaaatgggttaggtgtagtgtagtttacgtttgtaattttagtattttgggaggttaaggtaggtggattatttgagattaggagtttaagattagtttggttaatatggtgaaattttgtttttattaaaaatataaaaattagttgggtatggtgggtatttttagttatttagaaggttgaggtaggagaatggtttgaattcgggaggtggaggttgtagtgagtttagattatgttattgtattttagtttgggtaatagagtaggatgtttttttaaaataaaataaaataaaataaaataaaataaaataataaaaaaaataaagaatttggaaaaatatgttagttatttatgtattgttttttaattttgtatatattttgttaggtttcgtttcgtgatattggatcgaggttttatgagtttttttttttggttaaatatagttatgttaggttttatttataggggataatattgtggggagttgttaggttttgttgaggtagtagtttttttttttggttttagggttttttttttttttgaaggtatagttgttagtggcgtgtgtttagtggggtttgttttgtattgagtttttttagtattttagttttagtttaatgggattttagtaaattttttagatatttagtttttgtttatttatattttttagtaggtttttcggttatttagtaagttgattttgtagatttattttttttatattttttggtaagaatttttttgttattagtaggttgtaggtttttgtggtagttatatattttttaataaggtttgaacgtaagacgtggtaaggtgtggaggacgtttcgagtttttggttttttttttattaattttagtggtagtaattgtttttgtgtgtttgtatatatgttttaaagtatttattatagaaaatttattattttaattatttttaggtgtgtagtttggtggtatgaagtatatttatattgttgtgtaattattattattatttattttatttttttaaattgtaattttatttttattaaatattaattttttatttattttttttttttttagtttttggtaatttttattttattttttgtttttttgaatttgattattttagggattttataaaagtgaaattatatagtatttgtttttttatgtttggtttttgttatttagtatgtttttaaggtttatttatgttatagtatgtgttagaattttttttttttttttttttttttttttttttgaggtagttttgttttgtcgtttaagttggagtgtagtggtatggtttcggtttattgtaatttttatttttttagtttaagcgatttttttgttttagtttttttagtagttgggattataggtatatgtttttatgtttggttaatttttgtatttttagtagagatagggtttcgttatgttggttaggttagttttaaatttttgattttaagtgatttgtttatttcggttttttaaagcgttgggattataggcgtgagttattatatttggttttttttttttttttaaggtagaataatattttattgtatagatggattatattttgtttgtttatttattcgttggtggatatttgggttgtttgtattttttggttatgggaaaagtgttgttataaataagaatgtagtatatttgtttaagtttttgttgttagttttttggagtatatatttagaagtggaattattggatgttatggttattttgagtttaattttttgagtaattgttatattttttttatagtagttgtattattttatatttttattagtagtgtacggggttttaatttttttatatttttgttaatatttgttgttatttatgttttggttaatagttattttaaagggtgtgaaattatattttattgtggttttgatttttatttttttgatgattagtgatattgcgtatttttttttgtgttttttggttattggtatgttttttgtggaaaaatgtttgtttattgggttgtttttttttgttttgtggtttagttgtaggagttttttatatattttggatattagttttttatcggatatacgatttttaaatatttttttttattttgtggattttttttttacgttattggtagtattttttgatgtataaaagttttaagttttggtgaagtttaatttattatttattttttttgttgtattttcggtgttatatttaagaaagtattgttaattttaatgttacgaagttttttttttatgtttttttttaaagtagttgttttttatatttgttttttttatattttttagagtttttttgtataaggtaaaataaattttatttttttatttttatttataatatttagtgttttagttttgatattagatgtgtggttttttttcgtcgatttttaagtaattttttaatatttagtagtttttaattgggtgttttgtaatttagtttaattttgatattaattagagttagtgtagattttataggttaagggttttattttataagattgtttttaattttagagattagtcgtaagtggtaagatattaggttatttataatttttgtttgatttggttataaatttgaggtttttataattttttttttaggtttaataatttgtttgagtgatttatagaatttaggaaattagtttatttaaaattgttgatttattataaatgatattttaaaggatataaatgaatagttaattggaagagatgtataagaaaggtatgaaggaagcggtatggagtttttacgggagggtatattgtttttttagtatttgtaggtatttaataatttgaaattttataaattttatttttttgggtttttagggaggttttattatataagtatgatatgaaatttttggttattgatgattaatttaatttttatttttttttgtttcgtaggaggtggatgggaaaggttgtaagttttagttttttaattataaggttgggttttttggtaattagtttttatttttaggttgtttaggagtttttagttattagtcgtttttttagtaaataaaaagatatttattattttggagattttaagagttttaggagttatatgttaaataaagttgggggatagagattagatagatagatagatagatagatagatagatagatagatagatagatagatagatatattgatttttgagatagagtttttttttgttatttaggttggagtgtagtagtgtaatttcggtttattataacgtttgttttttcgggtttaaattatttttttattttaattttttaagtagttggaatcgtaggtatatatcgttacgttaggataattttttgtatttttggtagatatgaggttttattatgttgtttaggttggttttaaatttttgagtttaagggattcgtttgttttagttttttaaagtgttgggattataaatatgagttattgtatcgagtttagtttaaatatattttttttatattataatgttatttttttgtgatttttttaatagttaattattttttatagttaagaatattttatattataagttgttatttaaattgtcggtgtggtttttgttttttgattgggttttgattaatgcgttgaagtaagtataaggaaggaagtaatgaagataatagagaaatttaaggaaatggatattagaaaaggggagtttaatgttggttttttaaaaagatttagattgataattttttagttaggttgttgatgagagggagatggcgaatataaagttataataaaaggaatgaagtgttttttttacggattttatcgatattatagtgataaggaatataggtatattttattttattgtgttttatagatattgtattttttataaattgaaggttcgtggtagttttgtattaagtaagtttgttggtattatttttttaataatatgttaatattgtgtttttgtgtaggagtttgatgatttttgaaatagtttaaatttttttattattattatatttgttatggtgatttgtgatttttttttttttttttttttttttgtttttttttttttgagatagagttttgttttgtttggagtgtagcggcgcgatttcggtttattgtaagtttcgtttttcgggtttacgttatttttttgttttagtttttcgagtagttgggattataggtatttattattacgttcggttatttttttcgtatttttagtagagacggggttttatcgtgttagttaggatggttttaattttttgattttatgatttgttcgtttcggttttttaaagtgttgggattataggcgtgagttattgcgttcggttttttttttttttttttgagatggagtttcgttttgttgtttaggttggagtgtagtggagtgtagtggtgtgatttcggtttattgtaatttttattttttaggtttaagcgatttttttgttttagtttttttagtagttgggattataggtattcgttattacgtttggttaattttggtatttttagtagagacgaggttttattatgttggttaggttggttttaaatttttgattttaggtgatttatttgtttcggttttttaaagtgttgggattataggtatgggttatcgcgtttagtgattagtgatttttaatgttattattgtagttgtttttggggtatgacgagttatatttagataagatagtgaatttatttaataaacgttgtatgttttgattgttttattgattggttgtttttcgttttttttttttttgtttaggtatttttattttttgagatttaataatattgaaattaggttaattaataattttataatggtttttaagtgtttaagtgaaaggaagagttattcgttttttattttaaattaaaagttagaaatgattaagttgagtgaggaaggcgtgtcgaaagttaagataggtaaaagtgagattttttatgttaaatagttagttaagttgtgaatgttaagaaaaagttattgaaagaaattaaaagtgcgattttagtgtatatatgaagaagaagaaagtaaaatagttttaatgttgatatgaagaaagtttgagtggtttggatagaagattaaattagttataatatttttttaaataaaagtttaatttagggtaaagttttaattttttttaatggtatgaaggttaagagaagtgaggaagttggagaaggaaagtttgaggttagtagaggttaggttatgaagtttaaggaaagaagttatttttataatgtaaaagtgtaaggtgaagtagtaggtgttgatggagaagcggtagtaagttatttagaagatttagtttagagtattgatgaaggtggttatattaagtaatagaattttagtatagatgttttattttttattggaagaagatgttatttaggatttttatagttagaggggagaagttaatgtttgtttttaaagttttaaaggataggttgatttttatgagaggttaacgtagttgttgatcgtaagttaaagttaatatttattgatcgttttaaaaattttagggtttttaagaattttgttaaatttattttgtttatgttttagaaatggaataataggttttatttgatagtatatttgtttatagtatggtttattgaatattaaaaatttattgaggtttggtgcggtaatttacgtttgtaattttagtatttttgaaggttggggcggggggattatttgaggttaggagttcgagattagtttggttaatatggtgaaatcgtatttttattaaaaatataaaaattatttaggtatggtgttatacgtttgtaattttagttatttgggaggttgaggtaggagaatcgtttgagtttaggaggcggaggttgtagtgagtcgagatcgtgttattgtattttagtttgggtaatagagggagattttgttttaatttgaaaaaaaataaaaaaataaaaaagggttaagtacggtggtttatagttgtaattttagtattttgggaggttaaggtaggtaaattatttgagtttaggagtttaagattagtttggttaatatggtggtgaaattttatttttattaaaaatataaaaattagttaggtatggtagtgtatatttgtagttttagttatttaggaggttgaggtaggagaattatttgaatttgggaggcggaggttgcggtgagttgagatagcgttgttgtattttagtttaggtaataaagcgagattttgttttaattaaaaaataataataaaaaaaaaataaatagggttcggtgtagtggtttatgtttgtagttttaatgttttgagaggttgaggtaggtggattatttgaggttaggagttcgagattagtttggttaatatggtgaaattttgtttttataaaaaatataaaaattagttaagtatggtggtgtgtgtttgtaattttaattatttaggaggttgaggtataagaattatttgaattcgggaggtagaggttataatgagtcgagattatgttatcgtattttattttgggtgatatagcgagattttattaaaaaaaaaaaaaaattattgagatttattgtttaggaaaaaagaatttttttaaaatattattgtttattgataatgtattttgtgatttaagagttttgacggagatgtatgtaaagatgaatgttgtttttatgtttgttaatgtaatatttattttgtagtttatggagaagggataaatttgatttttaagttttattatttaagaaatatattttataaagtagtatttgttatagttagtgatttttttaatggatttgggtaaagtaaattgaaaattttttggaaaggattttttattttagatgttattaagaatatttgtgatttataagaagaggttgaaatattaatattaataggagtttggaagaagttgattttaatttttatggatgagcggtttaagattttagtagaggaagttattgtagatgtggtggaaatagtagagaattagaattagaagtggagtttggagatgggattggattgttgtaattttatgattaaatttgaatagatgaggagttgttttttatggatgagtagataaagtggtttttggagatgggatttattttaggcgaagatgttgtgaatattgttgaaatgataataaaagatttagaatattatattaatttatttgattaattcgtggttagggttgaaagaattgattttaattttgaaggaagttttattgtgggtaagatgttattaaatataatgcgtgttatagaaaaattttttatgaaagaaagagttaatttatgttaaaaattttagttaagaaattgtcggttaggtgtagtggtttacgtttgtaattttagtattttgggaggttaaggtaggtggattatttgaggttaggagtttgagattagtttggttaataaggtgaaattttgtttttattaaaaatataaaaattagttaggcgtggtggtaggtatttgtagttttagttattcgggaggttgaggtaggagaattgtttgaattcgggaggtagaggttgtagtgagttgaaatcgtgttattgtattttagtttgggtaatagagtaagattttgttttaaaaaaaaagaaaaagaaaaaagaaataaagaaattgttgttatagttatttttaatttttagtaattattatttggttagtagttattaatattgaggtagattttttattaagaaaaagattatggtttgttgaaggtttagatgattattagtattttttagtaaaaagatataatgattttatatattttaatagattatagtatagtgtaaatataattttttttttttttttttgagatggagtttcgttttgttatttagtttggagtatagtggtgtgattttagtttatcgtaatttttattttttaggttcgagtaatttttttattttagttttttaagtagttgggattataggtatgtgttattatatttagttaatttttgtatttttaatagagatgaggttttattatgttggttaggttgtttttaaatttttaattttaaatgattcgtttattttggttttttaaagggttaggattataggtatgagttattatgtttggtttaaatataatttttatatgtattgggaaattaaaaagtttgtgtgacgtgttttattgtaatatttgttttattgtcgaggtttggaagtaaattttaggtatgtttgtattacgaataattttaaatgagtaaatttaataatttatttgaaagggataaatttttttaaagtataatttattaaaagtaagataaggggaagtaaaaaaatttgaataattttttttatatattaaattgaatttgtgattaaaaataaataattattttttttagtagaaaattttaggtttagacggtttttttggtggattttattaaatatttaaggaagaaataatattaattttatgaaaatatagaaaataaagagaagggaatatttttaaattaattttatgaagttaaaatgaggttgataaagatattatcgaaataaattaataaataaagaaaatattatattaatattttttatgaattaatacgtaaaaatttttaaaaattgggtaaattaaatttagtaatatataaaaaggatgatattttataagtaagttggattttttttagaaatgtaaggttggtttaatattaaaaaattaggtttgtatagtggtttatatttgtaattttagtattttgggaggtagaggtgggagtattgtttaagtttaagaattgtagattagtttgagtaatataatgagattttatttgtataaaaaattttaaaaattaaaaattagtttggtatggtggtatgtgtttatagtttttgttatttaggaggttgaggtgggaggattgtttaagtttaggagtttaggttgtagtgagttacgatggtattattgtgttatagtttgggtaagagtgagattttgtttttttaaaaaaaaaaaaaaaaaaaacggggggtaaaaattaattattgtaatttattttattaaacgaataaaagataaaataatgattatttttatagatgtagaaaaagtatttattaaaattatatttatttatgttaaaaaattttagtaaattaagaatagaagggaatttttttaatttgataaaggttatatatgataaatttaaagttaatattataagtttggtataggtaaggatgtttattaattattattatttaatattgaattggtagttttaattagtgtaataaagtaagaaaaaaaaataaggtattaagattagaaagaagtaaaattatgtatttaaattttaaaagatttataaaattattattagagtaataaatgattttggaaaagattataggatataagatttatatataaaaatttattgtatttttatatattagtagtaaataattaaaaatgaaatttaaaatttattttagtttaaaatagtgttaaaagtaaaatttttaggaataaatttaataaatggtatgtaagattttttttttgaaaattataaaataatgtaattttgtagagatttttttttagtagagaaataaaagaaatataaaaggatttttaaaacggagatatattatttatataaaagatttaatattgttaaaatgttaatttttttttaattgatttatagatttaatataattttaattaaaatttatattgtatttttgtagatattaataagttattttttaaatttataaggaaatttaaaggatttagaatatttaaagtaatattttagatatttgagagattttatattaagatttattgtaaagttatattaattaagatgtggtattagtaaaggaatggataaaatattaagaaaatataatagtgttttaatatagggtttatatgtatatagtatatatattaatataggattatatatatagttaatataggatttatatgtatatagtatatatattaatataggattatatatatagttaatataggatttatatgtatatatgtatatatattaatataggattatatatatagttaatacggggtttatatgtatatatgtatatatattaatataggattatatatatatatatagttaatatagggtttatatgtatatatgtatatatattaatataggattatatatatagttaatatagggtttatatgtatatatgtatatatattaatataggattatatatatagttaatatagggtttatatgtatatatgtatatatattaatataggattatatatatagttaatatagggtttatatgtatatatgtatatatattaatataggattatatatatagttaatatggggtttatatgtatatatgtatatatattaatataggattatatatatagttaatatagggtttatatgtatatatgtatatatattaatataggattatatatatagttaatatagggtttatatgtatatatgtatatatattaatataagattatatatatagttaatatggggtttatatgtatatatgtatatatattaatataggattatatatatagttaatacggggtttatatgtatatatgtatatatattaatataggattatatatatagttaatatggggtttatatgtatatatgtatatatattaatataggattatatatatagttaatacggggtttatatgtatatatgtatatatattaatataggattatatatatagttaatatagggtttatatgtataaatgtatatatattaatataggattatatatatagttaatatagggtttatatgtatatatgtatatatattaatataggattatatatatagttaatatagggttgatatgtatatattaatataggattatatatatagttaatatagggttaatatgtatatacgtatatatattaatataggattatatatatagttaatatagggtttatatgtatatacgtatatatattaatatagggttatatatatagttaatgatttttagtaaaggtgttaggtaatttaatagagtaaggtatgtttttttaataaacggtgttagaattggatatgagtatagaaaaataagaattaattttgattttaaattaaatataaaaattgatttaaaatggattatataatattttgacggttataataggttaaaaaatgtaaaaatttaaaaaattaaaaaataaaaggaattatagaatatataattataaaatttttagaaaataagagaattttttttgattttagtgtaggtaaagattttttttataggttataaaaattataaatcgaaattggaaaaagttgataaattggattttatgaaaataaaatatttttgtttattaaataatattattaagaaaattaaaaggaaaggagtaatgtggaaaaaaaaatttatgatatatatatttgataaaggatttatatttagaatatataaaaaatatatgaaataatatttttttttttttttttttttgagatagagttttgttttgttatttaggttggagtgtagtggtgtaatttcggtttattgtaagtttcgttttttaggtttatattatttttttgtttcggtttttcgattatttgggattataggcgttcgttattacgttcggttaattttttgtatttttagtagagatggggttttatcgtgttagttaggatggttttgattttttgatttcgtgatttgttcgtttcggttttttaaagtgttgggattataggcgtgagttattgtgttcggttaattttttttttaaatgagatttatggggaaatagttaaatgaagaaataataaagtagtaataaaataaaatttaagttttattttattgtgtagttgtaggataaagagtagaagtttgtagttggggaataaggtgtttatttttttaagtattataaaatgaaggttttagaaattattcgattttgaaataatataattttaaaaagaagtaagacgtggatagataattttataaaggaaaatacgtaaatgattaataaggattttggaaaattgtgcgattttataagttattaagaaaatataaaataaaagttttaaaaaaaaatgaagtttggaataattgaataaatatataaaacgataataaaatgaattttgattttttattttatattatatgtaaaagttaatttataaaagttatataattttaagttttttaaaggaaaatataaatatttttgtaatttggtagggtaggtaaaggttttttataaagaatatagagagagaattataaagaaaggagtttgttaaattagattttataaaaattaaagtgatatatttttgtttattggaaaatattattaagaaaatgaataggtcgggtatggtggtttatgtttgtaaaatcggtttttggggaggtagaggtaggaggatagtttgagtttaggagttttagatttgtttgggtaatatagcgagattttgtttttgaaaaaggaaagaaaatgaataggtaagttatagattggaataaaatatttgtaaaatacgtatttgataaaagattagtatttagaagaaaaagttaagtaatttaattttaaaatgagtaatagatttgaaaagatattttataaaggaaaaatatatgaagagttaattatgaaaatgtgtttaatcgtattagttattaggttaaagtaaattaaagttataatgagatgatattattatacgtttattagaatgattaagattttatagagtgatagtattaaatgttggttaggatgtggagtaattagaattcgtatttattgttggtgggagtgtgaaatggaagggttattttgggaaaagatttggtagttttttataaaattaaatgtatatttattttatatttattttaggtgtttttatagaataaatgaacgtttatatgtatagaaaaatttgtataagaagaattagcgtaataggtttatttataagagtttttagatggaaatagttaggggttttttaataagagaatgattaaaaatttatagaatgtttatatagtggacgttatttagtaataaaatagaataaatcgttggtatttgtagtaatatgggtagttttaagaaatatttaaattggtaaaattatttcgtggtggaaaaaaagtataattgtggttgttttggggaaggtggggattgtgatgtatttggaggggtatgaggaatttattggggtgatagtgatgttttatgttttggttaggttgggatatacgtggatatttttgttaaaatttaaagaacggaacgttttatatttgtgtattttagggtatatatattttattttaaagaaaaataaaaataattatagataaatgtcggattttagttaatgaaatgtaaattgaggtgttgataggatgttgtgtgttgatttttgtagtttattttaagtgtattaaaattagcgtggatgttggtggttagagggatttgtggtgaagtaaatagtaaaatggttgttgtggaatttaggtggtaggtgtatgggtgtttattttagaattttttatggttttttttttgtggttttgttttgttttgtttttgagatagggttttgttttgtcgtttaggttggagtgtattggtataattttagtttattgtagttttaattttttaggtttaagtaatttttttattttaatttttcgagtagttgggattttaagtttgtattattatgtttgattaattttttgtattttttatagagatgggattttattatattgttcgggttggttttgaatttttgggtttaagtgatttttttattttaattttttaaagtgttgggattatagttatgagttattatatttagtttttttttattttttttatgtttgaaaagttttacggtaaaaagttggaaaaatgtaaaaaagattgaaatttattaattaaaaataggaaaaataaaataaaagagatggtaggagattattttttttttttttaatttagtttttaatttttttttttttcgtttagttaggataggaattttaagggttcgggtttttcgtgtttgtgcggggaaggaggtattttcgtgtttgtgcgggggttggttatttgtttttcggtgtattttttgtattttattttttttcgttcgtagtgagtagttatagttggcggaaattatatttaggtagtttttgtttataaatttagtgaaaatgtaaatttcgtaggagttggattttcgagagtttgcggcgttatttgttggaggaaaggttttttgtattcgagttttttttttttttttcgttgttattcgtttttttgtttaggttgggcgggttttttttttgtaatttcggggtattggtgtacgggaaatgtttagtgttttataatttttttttatttatattttaatatttagtttttagtggatatcgttttcgttcgataaatatattatataggtatagtttaagattatttattttaggaggagtataagttttagtgtttattattttagtttttttttttttttttttgacgtagtgatataggtttaggatattgaagatttttgattttataaatatgttgaagttaattattttgaagttgtagtttttattattattattattttttattttttgtaaagataaagttttgttatgttgtttagtttggtttggaatttttggatttaattgatttttttgtttcggttttttaaagttttgggattgtaggtgtgagttattgtatttagtttgaagtcgtagttttttaattattgttaatagtaatatttatttttttgtgagtagtagggtttgttggtatggttgatagttttgtattattgtatcgaatttgttgtttgggattttaggtgagtttcgatttttagttggagggataagttgtgtggggttgggtagggtgaattgcgggagattaagtttagattgagggttataagttatatgagtattggggttaggtagggatagtgaaggagatagtgtaattttgaggaaagataacgttatagaatggagaggtttaggttcggggtttttttttgttgtcggataggtatgtttgtgttttttttttagttttcgtgatggttaagttatgtgttttttgagaggtaagcgaggtttttgatagtaggttttaggttttaattaaattgtttgttttgtagggtgagttgtataggtgtttttattttcgatttttttgaatttttgttgtttttaagttttatttattttttttaggtgaatagaaatattgtttaggggagaacggaggaagaatttaggaaaggttgttcgagagtttggttgagtttacgttatcgttaagagtagcgttaaaatttaggagttggtgagattatggtttagggtttatattaatatgagggggtgttagttttatgattaatgagtttttgttttattattttttgttatttatattttgagggttatagttagtacgtgaattggagttggttttcggtatttttttttttatattagttttataatgtgaggtgggggttcgtttttagaggtattcggagtagtaggtgttttaagagggggaagttttttcgaagtttttttttatttacggtataggacgtagaggggatagagtattaggaatatttagcgattataggggtttgtttcgaaggagaggaggtaggaggtagggagagtggttgggaggttagttttggagtgtttattttttatttcgagggagaggaaggaagtagaaggtgagtatagggagttttagttggggatggagcgggggttgtagttcgattgtgttgtttggagcgggggtatggattgtagtttttatttatttgtttggttagttcgaagttattttaagtttggagattttatttgttttgtttattttttttagggatggtgtttaaatttcgaagttttggttggtgttgtaaatatgggagggaggttttgttttattttagttttaagagttagttaagaatgttttggatatttgaattttgtttcgagttagaggttgggaagaaatttgaaggatggtgggacggtggatagtagtttttaggtattaggtattagggtttttgtttggggatgggggtattagtaggtgttaagtgtattatattagggtttattatgtttttgtttagagatttagtattttacgaaataggaaggaacgagggatgagcgtgtttttttttttaatattttagtttttgttttgaggttgttaggtatttaatttttttaggatttaaattattttggttttatttacggttaagtgtattaaattatagttaggattattgggtttagatattaaaagcgttttttttaaagtcggtagttattagggtagtatagggtagtgtaaggttgggtagggtcggttatttgttagtatttagtggtttttgttggatgttgacgggggtagttaggtaggtgggtttatttagtaattaaagagattttttttttttaattttttttttaaagagattttgattttttttttttagttgtagggtttgtagtagttttttttttagtaggtttttttgtttgtttttggttatttttagtagttatagggtattgaggttttattatagtgagaataaaattaagtttttattagggtttttaaggttcggtacgatttggttttgtttgtcgtattggtgttattatggttcgtttttgaaaatatattttagttatttttattttttttaggttttagtttcgggtttttatatttgttgttttttttgttaggttgttttttttttggattttggtttggttgggtttttttggttattatagttttagtttagtgttattatttagaaagggtttttattaattttttcgttatatatatagatatgtatttttagtaatttgtttttagtttttttatagtttttatttaaaattatttatggatttgtttatttgtggattgttttttagttttaattgttaagtaataagcgattagcgattgtgtttttgttgttttttattataggttaagtatttaagagaggggttgtatatagtaggttttaataaatatttattagacgggttaggtacggtggtttatgtttgtaattttagtattttgggaggttaagttgggtggattatttgaggttaggagatcgggattagtttgattaatatggtgaaattttatttttattaaaaatataaaaattaattaggtatggtggcggacgtttgttattttagttatttgggaggttgaggtaggagaatcgtttgaatttgggaggcggaggttgtagtgaggcgagatggcgttattgtattttagtttgggtgacggagtgagatttcgtattaaataataataataaaatatttgttagaagaattaaagtagtttgtttgtgtttaataggaatttaagagtataagatgaatttaattaaaggatatatatagtaggtattttatagttgatatttgttggtggagggagattaggaaagtggggagaggtagtgtttgggtatggggatattttgggtatggggacgttttggatatagggatatattgggtacggggatattttgggtataggacgttttgggaacggggatattttgggtacggggatattttgggtatggggatgttttggatatagggatattttgggtacggggaaattttgggtatggggatgttttggatatagggatatattaggtacggggatattttgggtatggggatgttttggatatagggatatattgggtacggggaaattttgagtatcgggatgttttaggtacggggacgttttttgttatttgaaatttcgtagttttattatattcgtttgttttagtaaatcggtttaaagagtatttttaagtttttatggtaaagttttagagttagtgttttttcgttgatttcgagggtgtgttgtttatttagtgtttaagttagagtttttttatttagaaaaaaaaagaggagggtggttttacggatggaggtatgagggcgtttataggtagagggagttttcgggttgagatttgcgttattttttgttttaattttaaggcgtagtttggagtttaaattagtttttaaacgtgggtcgttggttaagaggaatttttttatttacgatttttttttatatttagtttttattgtttagagtatgttagttttgtttgttttggtttttaggatttttttagggatttttaggttttaagttagggtgggtttgaattaaggtagttttagaatttatgttaatgtttttgttagtgggagattttggggagtatcgtgcgggatgtatggggttaggcgggggtatatagcgagcggttttagaagttttggtcgttcggagtgggggggtgtttagagtaagagacgggttaggaagttggagtgagtaaggaggttttagtttttggtgggagtaggtcgggtaaaaataaattaatttgagggtagtagttagcgagattattataggaggggtggtggggtcggaggggttttaggagtttaggagagggaggtattgttagaggtaaggtcggtagatgagagttagtgttggtaggattaatttgttatagtagttatggtttattttttttttttttttttatatatgtttttggggtttatggaatttattagtttattataaaggatattataaaggatataggggaagagatgtgtagggtaaggtatgggggagggacgtagagtttttatgtgttttttaggcgttttattttttaggagtttttatatgtttatttatttagaagttttcggaattttatttttttgagtgtttacggaggttttattacgaaggtatgattgatttaattattggtcgttgatgatttgtttaatttttagttttttttttttatttggaggttgcggggtggtgttgaattttgtgattttatttggttttttttgggaattattttgaagttgttagttggtttgttaattatgagtatttaaaaagatattattttggagattttaaggattttaggagttgtgtgttaggaaatggagatgaaaattaagtgtatattttataatatgatagttagttttttttaattttagttttattttttgtcgtgttgtcggttttagtttttcgcgttttagggtttttgaatatattgtcggttgtttgtagcgatcgtttttgtttgttgggtttgagtttggtttattttttttatttttttgcgtttagttcgaaggtgttttttcgaggtagtttttttgatttggttttacgaatcgtaggttttgttttgttattggttttttttgttatatttgttattttttgtgttttacgtttattgatgtggttttgtatttgtgtagttttatgagggtaaggattgtgtttggttttgttttttacgggattttagcgttaagtttatagggagtatttaatgttgaatgaatgaatgagtgatcggtaagggaggtttattttgttatgttgggggttaaaggttgttgggcggattatatgggtgaggttgggtggggagggaagtagagatgattttttggaagaaggggtaggaggcggggaggtgggtgtggggtgttgtataaggatggtaagtgtttttaggggtgataagttaatttagagtattaggtagtagaaaaaggttgatatttttacgttttatttttatttagggagaggttaggttttcgggaaagttagtttttcgttgttaggagagttttaagggaagttttattagttgttgagttggttatagtggaaatttatgtggtgggtgggaggggtttgaggtataggggtttgggtggtggttttaggatggagatttgtgtttagattatgaggggtggttttagggatgattatttttaaataggaagtagataaaggtatagatggtagaagcggaggtagagaatgggttgtaggggtttttttagagggagagtcgagtaaggggataggttggaaatatttagtttttatggtttgaagtatagatagttggttttatacgtaggtcgggtagttatattatttagaataaggggtatgttcgtagggtaggttttaggacgtttcgggttggttttgttattagtttagaaagacggtttaggttttttcggtagggagtacgtttagttaggttttgggtaggagttgagattttttggttggtttgagaggggatgatcgagtgtaggtttagttcgggatttttttattttttttcgttatttagcggaattagttgggcgtgagaaaagaagagaagtgaattaagagtttagagtatgaggttggattagtttttatattatatgtaaaaattaatttaatttgtattaaagatttaaatttaagagttaaaattataaaatttttagaagaaaatataggggaaaagttttttgacgttgtatttggtaatgattttttggatatggcgttaaaagtataggtaatagaagaataaatagataaagtggaacgttatagaagtttaaaatatttgtatattagtttgggtgcggtgatttacgtttgtaatttcggtattttgggaggtcgagacgggtggattatttgaggttaggagttcgagattaatttagttaatatagtgaaatttcgtttttattaaaaatataaaaattagttgggtgtggtggcgggtgtttgtaattttaattatttaggaggttgaggtaggaaaatcgttggaattagggaggcggaggttgtagtgagttaagattatgttattgtattttagtttgggtaatagagttagattttattttaaaaaaaaaaaaaaaaattgtatattaaagggtattaataacgtggggagaaggtaatttatggaatggtagtaaattataggttagatatgggattagtatttggatattaatttatagattttttaatatttagtaataataattatttaaattaaatataggtaaaggatttggatagatatttttgtaagaatatgtgtaaatgagtaataaatacgaaaagatgtttaatattattaattattggggaattgtaaattaaaattataaggagagattttttataattatgagttttgggtaggtaggaagacgtttggtggggagttgtcggttttatgttgtttttagaatttttgtaggggttaagttcgatttcgatattttattaggagtatagaaacgagtggaaaaggttaaaggttattttaaagggttagaggggtttagtaaggagtttgggatatggaattatgttgtgtatttagatatacggggataatagggggatgaaaggtggtttttaaaatttatatttattttagagtttatgaatatggtttatttggaaaaagggtttttgtagacgttatgaagttaaggattttgagatgggattattttgggttatttagtgggttttaaattcgagaaagattgttcgtatgagagatagatagggggagatttagggtatagaaggaggtttcgtgataacggaggtagaggtcgagtggtgtggttacgagttaaggaacgttaagggtttcgggagtcgttagaagttgttagaggcgagaagtaggttttttttcggagttttcggaaagaattaggtttgttgatgtcgtgatttcggatttttggtttttagaacggcgagagaagaaatgtttggtgttttgagttatttagtttgtggtatttggtgatggtagttttaggaaattattatagggattagagtttttacggggttgggtaggaagcgggtgtagagcgcgttaggttaggttttttatttcggagatggaaaagtagagttggagaggttgagatcggataggtatcgagcgtttaggggtaagaatttttaggggatggtagaggttatcggggatagtatagcgagggataggagggaggggtgagggttgaggtatcgttttttaggaggtttcggtttttcgtttattgatgatttaggaatttcgtaagaggagttgggttttattttgtgtcgtattgtattagatggattttggtggggatagacgtttagcgatagcgtggttaagttttttttaggatttcgggtttgtatttatgattatgtatagacggttattttttttgtttgtagttttttttcgtggtttgtttttagttttttagtttaatagagttttttagtggaaagttttttttttggagattttttttttgttgaaatataagtttttggaataagataaaattgtttaatttgtaaaagttataaagtcgttttagaataaaaaaaaagtttcgatttttggttggaaggagtggttttttatgttttagcggttagttattattttatgatttatgtcggttttgttgataaattttttagtatttttttaggggaaggttatagtttttagggagggcgggagagtatttaggttttcgtttataaattagatcggagttagatattgtcgagggagggataagagggtaggttttggggtttttaagttttttttggggttggtagattatcgtggatttattagggtaggattatttttttttataaattttttttgggtagttgtagggtagtttgagttggatacgttttatacgttagtttagtggggtatgaggtatttatagttacgtttggaagttagcgggtcggtatttgtcgggtaggtttttgttatataggtatagcgttttttttatggtttttttttaggttagagtatgtttggggattagagtagttttcgtagtggtttgtagtttgataacgcggcgtgagttatgttttgtagagaagaagagttttttagtgagggaagaggcgtttataaaatttaggatacgcgtagaaattcgtaggaggtgggggcgttgtttaggggtcgtgtcgtttttattttttattttgtagatgacggaattgcggtttagagttgttaagtggtttgtttaaggttatttagtagggataggaaggaagttatttttttagggattgtgcgggagtttagtgataattaaagattagcgttaaagtttgtttaggacgagaattttattaagggaaatagtttcgggattgtcgtgtttattcggaaggtagttagtttataattgagtttttaaaaatgtacgtttttttatatgaaaatatattcgaatgggattttgtagaaagtattttttattaaggtatagttcgaggggaggttttcgttttatttttggttgtgttgtttttagttaagggtagtagggattagagtggtttttggggtatagtattggttgtttttaaagagtgttttgtttagtttatgaaaagttcgtgttttgtgagtttgggagggtgttattatttttagttttttagggagtattatttttaaatttacgtttttttgtttagtttttagattttttgttggttatttatttgggtttcggttagattatttataaagtgaaggtcgaattcgaggtttttcgaggtttttgttagttaggcgggtggagtgacgtttttttggggttggtggtttaggaggtaggggatttattgtggtttgtttaggttgtttggtggggtggttatttcgaggacggttttattgtgtaagtttgacgaaggttttttttagcgttttttgttttgcggtttttgttgggcggagagtaggacgttgggttttatatttattcgttttagcgggtttgagttttcgagtttaaatagataagatgtagttttattgttatttaagttttttgtcgttttttttggtttttttttgaggttcgtttgttgtgttcgattgggtgtgtttagcggtataatatatattcgttttattagttttaacgtgataattaagatgtggttttgaggtcgggcgtcgtggtttacgtttgtaattttagtattttgggaggttgaggcgggcggattacgagattaggagatcgagattattttggttgatacggtgaaattttatttttattaaaaatataaaaaaatatggcgggcgtttatagttttagttgtttgggaggttgaggtaggagaatggtatgaattagggaggcggagtttgtagtgagttgagatcgcgttattgtattttagtttgggtaatagagttagatttcgttttaaagaaaaaaaaaaaaaaagatgtggttttgggagtagtggtggaggggattatacgttttagagaggagttatcgagatgggttttttttttttaggttttttagggattttttaatatatatatagtggtaattaatagattagggtttaaggtacgtaggggttgatatttttagcgatttttcgttttatggttcgtaggttattttagaatatttaaagtttggagtttggtttagttattttatgttttttagcgttgggtttagagggcggtatgagcggtagaaattgttattattgttaattatcgatgacggcgttggttacgtgagatggtagttacggtatcgtatgtgagtgaagggattaaggaggttgggtttgggagggagggtttggaaagttggggtgaattaaaggtaggggagttttttttttttttatttgtttgtttacgttttgatgggtttgtgtttgcggtaagggggttgttagcgtgaatggatatacgtatatatatgtatatatacgtgtatatatacgttaggtttttttgagcgtcgggagtttttttttttataattaattgttaggaaggtatagaaatgttattttaggtaggagatcgaggtagttttgaagatagattttggttggaagtaaaaaataaattatatagtggataaattaattattagttaggtttaagcgtcgtcgttttagattcgagttaggggggtaggttttttatatttttttaaggtttcggcgttaatagttttagtattgatagtggttatgatatgtaagaatggtatattggaaaatgaaagggaagtagttaggagagaggagagtcgagtttaaataaaagttagatttaggagagtttagtttttgagacggagtttattttacgagtttggaatcgttaaaaagaaaagaaatatttttgtgaaaaatgagtaaaagcgttttttgtatgtttatttttttaggtataaataaagtttcgagtttagggtagtggggggcggtcgatggggagggggttgtttgcgtatttgagattcggtttttttttatttttacggatatatttagtagcggcgggagtttcggcgtttcgtttagaggcggtttttttttttttattttcgtcgtttttttttttttagttttttttttttttttttttttttttaaaaatattttttgtttggtttaatttttttaatttgttgtaattacgaatgtattcgaattattatatttttatgtgttgattatatgtttgtgttttaaattgaagtagtattgtttttttaaaacgggaggaaaaagggagtaaaggagagaaatttaaaaataggaggtaggagagagggttcgaagtgggtttcgaggagttcggtagattatcgggtttgtttgcgagagttttagagtttcggtcgttcggtttggtcggtggttgtagaggtttcgagtgcggttttcggtagttttttttttttattttttttagttttcgtcgtttcgaggtttgttgtttttttttaatatttatttggagatgtttaatttagatttttggaaattaatttatagagttaaatttttgacgatttttaaagttttttattttttttgtttcgcgatgttacgatttttttgggtttaagggtttaaaaagtttagtttttgcgtgtttgtttcgtttttttttgttttgggttggttttagtttttttttattttgtattttaacgtggttgggtaggaggaacggtcgtgttttaggttagcgtgttgagaaaaggtttcggagtatttgtttaggaggaattttgagaagttattttttttcgttttattagtttgtagtgatagaggtagttgtcgttttcgtttaggtagagagggcgaacgggacggggattttttggaagatttttattatatacgtatgagttagtgagtttttagtcgttttttgggagggagcgagttttttttttcgggaattcggggttttattgggggattagtgttgttttttattgtttattcggggtttttagaggttgtttatttatttggggggtttttattagtatatggttagggtttatgttgaggttaagggtttagtagagtaggtgggggtttataatgtgggtttttggggtgggaattaggggtattttttttgtttttaagttttattttaagggtttatttaaattcgagatacggaggttggttttgttggtttaagtttgtttaaagagaatgtgtgtttgtgttaaggttgagaatttaggtaatttttttgaaaattttagattgttagtttttgttgagaaagggaggacgcgtggtcgtattacggaagtttttttgtttggtcgtatagggttggtataagatagttttgttttttagataaaatattttttagtttgtgttgttttttaaggtttttaataaatttataatatttgtatttttttatttcgatatatttcgtaggtttttgagtttataatttttgttttatagagttaggtgagttatttgtgattaggtgaggtttatgtatagttttcggttagatgatagagttaaaggttttgaagtgttattttaggttatagtttcgttcgttttttgtttgggataggattttaaatgtaatttttttggtagaaaggatatttttttggggggtggggaggattatttttagttttttgggagatattaagtaattatttttttttaaagagtttggaggatagttttataggtagttagatagtgagggaggtggggatagtattttagtcgaggtgggaggttggggaggaagggagggattatagttacgagagaaggttgaataatggttttagggatagtatgttttaatttttagatttgtaaatgggattttgtttggaataagagtttttgtatttgtgatttagttgtagattttgttgtggcgagagtattttggatggtttaggtggtttttaaaggtagtttcggtgtttatataagacgggggtagagggagatttgatatagatagggatggttaagtggagatggggttcggagagatttgtagatgttggtgttgaaggtaagggttatgtagttataagttaagggatatttatagttattagaggtttaaaggggtaggcgatgaaggtagtggtttttaatttttttggtatttgggatcggttttagggaagataatttttttatagattagggagtggggagatggttttgagatgatttaagtgtattatatttattattttattttattttattttattgagatagagtttcgttttgttatttaggttggagtatagtggtattattttagtttattgtaattttcgttatttgggtttaagtaatttttttgttttagttttttaagaagttgggattatagacgtttgttatcgtgttcggttaatttttgtatttttagtagaaacggggttttattatattggttaggttgattttgaatttttgatttcgtgattcgttagttttggttttttaaagtgttgggattataggtataagttattgtgtttggtttttattttttattttttgagatagagttttattttgggattataggtgtgagttattgtattcggttataagtacgttgtattgattgtgtattttatttttattattattataatatataatgagataattatataatttattataatgtagaattagttggagttttgagtttatttttttgtaattagacggttttatttggtggtgatgggagacggtgatagattattaggtattagatttttataagaagtacgtaatttagattttttatatgtgtcgtttataatacggtttatttttttataagaatttaatgttatggttgattagataggaggtagagtttgggtagtaatgcgagtaatggggagtgattgtaaatatagatgaagtttcgttcgtttgttagttatttattttttgttgtgtaggttagtttttaataggatatacggggttgggaatttttgttttagagtttttagagggttatgtttagtggatattttgattttagtttggtgattttgatttcggatgtgtggtttgtagagttgtgagaggatggttgggcgttgttgtgatttagttagtttgtggttattcgttatagtagttgtaggaaattgatgtagcgttatagacggagttagggtttagtttattggagttgttttttgttattttatttttttttaaaatattgtgttaagttaattattaataattattgatttcgatgggtaggaatcgtagaggttttttggtttgtttttttaattttttttttaattttgaaataatattttttgttggtttttttgattataaatgtaatatttttttttgtattgagtttagaaataagagaaaaagtaaaaagtagaaattttagttgggtaaggtggtacgtgtttgtaattttagtattttgggaggttgcggcggaaggattgtttgaagttaggagttcgaggttgttgtgagttataattgtattattgtattttggttgggtaaaaagagtgagattttgttttaaattaaaaaaaaaaaaaaagaagaggaagaaaatttattaattttattcgagattttttatacgaatttttgttgtggggtagggaagtttaggaaggttttacgaggttttgatttagtttggttggcggtgggaatttgggaatagtttcgagtgaggggtcgggttatgattgagtttatttatttagttattttttgtacgttgtgtatattatgggtttgacggttagggttggagtatttgttgagtatagttttgatttttagttttatttagtatggtttggtttgaggtttatttttttttcgtgtttgaaaatttaaatattttggtttaggcgggggattatttgaaatggaaaatttggtagtatcgattggttttgaagaggtaggagttagttatgagtcggttgggaggcgagtgtagaggtggtgaggtaaggttagtagagggtgggggaggcgagggttaattttttatcgcgtatggtgtaagtattaagggggtattttattaggttagtgtagatttaggtttttgcggtggatttttcgcggtttttttttttagaggaatattgaagaggtttttgtggttttgttttagatttagaggtatatttgtatattaaacgtattgagtaattttatagtgagggagtcgggtttggtttaatttatttttttttaaattggattaaaggttgttgttttaggaaggtagggtttttaggtttacggttttgggaaattttggttgtgttagtttatgagtttagtttttagttattttagtttgtttatattttggagtgggtattgttatttaaaagttttttttagatagtttttagggcggtatttttgttttttattttttatagatttttggttatttttttgcgatattagtattattggtttatagttttttttaattgtaaagtggggtttagcggtataggttgggtttggtagggcgggaaggaagagcgaaggttattttgtttttaatagtattggtcgggttttggaaaggtcggaatttatagataggaaggaagtgttatatttatttaatttgttttgcgttagttagggggtattttgtagaaagaagttaggtggtcgtggtcgggtgtagtggtttatgtttgtaattttagtattttgggaggtcgaggtaggtggattataaggttaggggttttagattagtttgattaatatggtgaaatttcgtttttattaaaaatataaaaattagttgggtatggtggcgtatgtttgtaattttagttatttagaaggttgaggtaggagaattgtttgaatttgggaggtggaggttgtagtgagtttagattacgttattgtattttagtttgggcgatagcgcgagattttattttaaaaaaaaaaaaaagaagttaggtggttattttttagtttttggtttggtttaggaattgttttttttttaagatgttattaaatgttttttttattaggaagttttttttggttgttttttttatttttgtttttgttttagaatacggttcggtttttacggataattttgatattagagtttaatagagatttttttttttatggaaatttatattttaaattgaatatgtgtgtaggataagtttttgtttttatgtgaaataaaagtgaaaggtgcggattatttgtttttttttatttttttttataataatttgggttttataggggtttagtaggagttaggtttagtttagtcgttttaggtgtattattttgggtattagcgtttttgtttttttttacgaagtatagttttattttttggtatttagtggggaggggatatatattaggtattttttagggtggattgtgttttttatattaggttaggaggttttggggttggtttagttatttagaaaagggagtaggcggtttaggtgatattgatgtgggtagtaggggttttcgggaaagggttttcgtaggatcggttttattttgttttaggagtatatattggggaagggtgttgcgcggaggtggagagaacgtatttttggttgaaagtatgttttttgatgttttgggttcggatttgttgttattttttatgtttttttatttaatatacgttttagtaaattttttatgttgatgagcgttaagttatagaggacgtataatttttcgttttaaaaagtgattttttttgttgggtgtggtggtttatatttgtaattttaatattttgggaggttaaagtgggaggattatttgaggttaagagtttaagattagtttgggtaatatagagaaattttatttttataaaaaaaaaaaaaaaaaaaaaaagtttaggtatagtggtttatgtttgtaattttagttatttgggaggttgaggtaggagaattatttgaatttgggaggtagagattgtagtgagttaagattatgttattgtattttagtttgggtaatagagtaagattttattttaaaaaaaaaaaaaatttttttttttgaaatagggttttattttttttgtttaggttggaggatagtgacgtgattataatttattgtagttttagtttttcgggtagttggaattatagggttgtattattacgtttagttaattttttgtatttttagttaagacggggtttcgttatgttgtttaggttggtttggagtatttgagtttaagtgatttttttatttcggttttaaaagtattgggattataggtatgggttattatgtttagtttgaaaatattttttttaagaattagttagttatggtggcgtataattgtagttttagttatttaggaggttaaggtaggaggattttttgagtttggtaggttgaggttgtagtgagttataattgtgttattgtattttagtttgggggatagagaaagattttgtttagaaagaaaaaagaaaaaaaaaagatttttttatttattttttgtttatttttagatttaattattgaagtttgtttttttgaattaaaaatgaaggagtttcgttttggatttttttttgttgattttgttattgtatttgttagtagagttagttaagattttttaggttggttttagtttggttcgtttatagttttttaagtaagacggatttttaggttgaggttagttgtatttttttttggaatttttttttattttttattgtgttttagattttggttgtttttaaataaatataatttagttatttttgtttttggggtcgttgtagggtttattggtgtaaatcgtttgggtaggtttgttgttttaggagtttttttaggttagcgtggaaggaaattaagataacggggagaagtagttcggttgggtttaattttatttttatatgttcgtgtttagttaattatttgggttgtagtttgataggagttggagttggcgttttatttttagagggggttttcgattgtttttgtagagcgagggaggtttgggggtgtagaggttaagggtttttgtagagtttgttttaggttttttgagtttaagtttttttgtagttaacggaagattttttcgagagcgggtgttttttattttgtttgtttagtaggtgtttagtaatcgtttattggataaataatgaatttgtggatttaacgtgaagatgatttaaattagcgtttttttatagaatttttcgtaatgatgttaatgttttgtatttgtcgtagttaatatggtagttatatgtggtagtgaacgtttgtaatgtggaagggttattaaggtaaagagtttcgtatttatgttataatttaaatttaaatagttataaatgtttagcgtgtgtttcgttatatagattttttttgttattttttttttttttttagagatattgtattcgttattaattttttattcgggaggtaaacggagaaatgttattttttagttaacgtaaaagaaggttaatatttgtattttaagttagttttttgggtaatttttttaagtattttttattaaggttagtttagtaatattttttgattgtttgttacgtattaggaaagtatttcgtcgtggttttggttcgaggttatggaggatatagaaataattaaggttaagttgatagaaggggtgtgataagatggtttaaagttattgagttagttaggaggtttaggagtatggaagttttgttttttagaggataagtggtaatttatttagggggggttcgagtatttagagttaggagcgtagaagtagggggttttaggttggaaagcggtattagggttaggttgggcggtagtacgaatttattttcgaggttttgggggcggaaattaagggttttatgagtaagaagattcggtttaggtttaatggaaatgatcgggtggagggattttattattcggtttttagtatatagggagggaagtggtaatcgttttttaaatgttggtcgtggaggggaaggagttatagtagggtaggggtggggaggatggtatttgttggtttaaggagggatgatggaggtttaattaagatatgatcgtgatcggggtagtttgtttaagggttagtatgtagagggcgagttgatgagattttggtagtttgttgagatttgggggtgttggggaggtagaggttaaggttaattttgagattttttgtttgtaaatttgggtgggtggtaaggttgatattagagaaatagaggaagagtgggtagttatgggtgagagaggaagtaatgaattaggggtgtttgtaagagtttaggggtaaggttttcgggtagttaagatgttggtggttttttttacgattagttttttttacgtggtatatttttgtttgtatggttgggtatggggtatttgttcgttcgatatattttgagtagttattttgtgtattgaggtaacgtggtacggtgttttggggaaatagcgaggaggtattgtataggttttatttttttggtattttttgttttttggggatggtggtagttaaataagtgatagttaattgttaggagagtttggttttgatttattaggtggagttaggtatttttgtcggaagaggtatgggaattagtataggatgaagggaggtagcgagtattagtttaggttttgtttttatagggttttttttttatatttatttgtgtaggcgttttttgtgagggtagagatatttgtagtgtttgagggagattttttgcgggcggggtcgtttatttatagcggttaggtgggaggtgtattagtgttttgtggttgttataatggattatagttgtggggtttgaaaaaatggaagcgggtttttttttatgttggaggttagaggtttaaaattaaggtgttagtaaggttatattttttagggaggttttggggtggggtggggggggggtttttttttgtttttttttagacgttttttggtttggggttgcgttattttattatttgtttttgtttttacgtggtttttttcggtgtgtttgtggtttttttgttttttttaaggatattagttgttggatttagggtttattttaatttagaatgattttattttaagatttttaattatttatatttgtaaagattttatttttaatttttaggttatattttgaggtttttggtggatatgagtttgtgggggatacggtttaatttaggatagaagggatgatgggggtattggggaaaaggttatatattttagaggtattggaagatggaagagtaggatttagcgatacgggatgttaggtagaggagttggttttaaggattttagtcggggtttgagggttagagggagggaagtttaggtattattgagatgaaatgtttcgtgtatcgtgggaaatagggtaaaagttcgttggacgtttagttagagaggcggttgtttgaggtatagaaaatgagcgaatatgggagagtttattagaaggttattcgggagggcgtggtggtaatatttagaagggttgagaagcgtatttttatagtttagttaaatttatttggggaaatatacgttttcggtagtattagtaatagagaagattttcggcgatgttattagtgggttacgggacgggtaaattttgtttttttatatagaggaatattcgttagttgttaaaataagtgaattaaggtttcgtggatttatacggataagtttttacgtcgttacgttgtgggtataggtagggtagttattgattttagtgaggtattaaggatgtgatgttgatgacggtatttaagaggagatagatttaggttgtttagttatacgatgttgatgatcgtatgtaagaggagattaggtcggatgcggtggtttatatttataattttagtattttgggaggttaaggtaggtggattatttgaggttaggggtatgagattagtttgattaatatggtgaaattttgtgtttattaaaaatataaaaaaaattagttagatatggtggcgggtgtttgtaattttggttattgaggaggttgaggtagaagaatcgtttgaatttaggaggtagaggttgtagtgagtcgagatggtgttattgtattttagtttgggcgatagagcgagattttattttaaaaaaaaaaaaaaggagatttaggttttttagatatattattgtttagtatagatgtgtttgttcggggttagattttaatttagaggggcgggtatcgtagtaggagtggggttaggatggagaaggttatttagggttgcggttatatttgtaatgttttattttttaagcgggatggtgagtatataggtgttttattattttattttttatatttttgttttgtagttttaagaattttattttttttttaaaaggaaagaaagtgtgtgagttgattaaagcgttgattatggtgttatttaagtttttgttagaaatgttatttttggtttagttttaaatataatttcgagaagagttttcgtttttttggggagggtaagagttttagatataggagattggttagatgtggatttatagagaagttgggttgggaggatgggatggtagatagtcgtttggggagtgttaaatggggaggtcggagatgttggggcgtttaggaatgaatttttgtttggattagggttttagtaaaagggaggtagggagaaagaaagaagttaagaagatgaggaaagggtgtttcgggttagagtttatagaggtttatagagggaggatttcgtgtgttagtaggtagttttacgtaaatttagattattagtttgtagttttgggatttagtaaattatgttttaggtttttaagttgagttgtgatcgtggttgttaagtgttgatagtatagaattagttagtttgagtagagggaagtaatcgtcgggggaggttgtgtttatgtagtttagggtgttaggtttttaagatgtaatttttataagaattgggggattttttttatttattttattagaagttggttaatgagagggaaggagatggagaggtagattagatgcggagtcggagaaaagttttttagaaatatagtagcggttgggttgtttagtggttagtgtttaatatgattgcgatgggcggagttttttttaattatagcgttgaattatgtagttgtttaggggtttttagttagagtattatttttttttttttatatatagttttattttgtattgtaaggggttttatatgtatttaatgtggatacggtattttttttatttttattttttgtaaaaagttattttttttattgtttaggtttggtggtgtatagtttacgggtattgtatttatttttggaaggtagatttaggaggcgtttgtgttgtttttatagaagtaagtttaggattagaagtaggttttgggtttagaattttgaggttttaggtgttagtgtggtttggaattgtttagttttatagttattagttatacgtagatataagtggaaatttatttaaaataaataaataattttatgtaagtaaatgagtgaataaagtaaacgtaaatatttatattttgagtgtgtaatagatttaggcggttaagcggttattatataggatggcggagtgtagatgtatagaatagatttattattatagaaggttttattagacggagttggtttagagtatggaggtggcggttttagatgggtatatgtttttgttttcgtaggcgttttgttttggtaggacggttgttttattttgttttgaaggtagttttggtttataggcgttttatttgtgtggatttgatttcgggttcgtgttttttggtaattttgttttttttagaatggttaatttatgaaggtatagtttttgtttgtttgttattatgatggtagttaggggtttggtatttagttggtttttagtatatatgtataggtgattacgttatttttgttttttttagagtttttcgttttttaggggaggtaagtttatttattgttgtgatttattattttttttaaatagaaaagttattagatgggtatttgttttagtttggtcgttggaagtgatagttaagaataacgtaggtttttagaaatagaggtattagtatggttatattggggttaggtaggggagattagggatatttagtggggagaagatgacgcgtagatttagttttggggggtaagggttggaggtagagttttgatttttttgttttatttttttgtttaggttgtatttagtgttggtagagtttttttaagtttataagttgtaattcgtgttttggacggttagttttagagttttgatgggtgtatttgttttttttttttattggttagtgtggaaaatttttaaatatatggaaaaagtataaggagtagtatagtgattattgttagaggtttatttatttttttttagataatatcggacgtatttgttttattttggagtattttttattttgtaaggttgtagggagtttatagatattgaattaatatcgagaggtttacggttaaagttatttgtttatggtatatttgtttttttagtattttaaattaaattatttagttttatttattttttgtttttttttttgtttcgtatatacgggtttgttttttgagtttgggggtggttgtttttgtttttataaggattatttttagtagggtagcgtcgataggtttggaagttatttgagtttaaagtcgttaaagattgcgtttttttgggaaatgggtaagtggttttatttatttagggaagttaggtggggaggtaggttttagattagaatgaagggattttagtataaatatatttatgagttgggtggggttagagcggagcgagttatttatttgggttattggagttattaagttttcggagtcggttattggaggttcgcgtgttttttaaagatagagataaagggtaaaggttatataaggttattggcgtttttttttcgggtggatgattaatattaggaatgttttcgtttttgtttttgttgtgagttttagagttagaaacggggtttatttggggatagaggttttatttttttaggtaattttggacgttggagggatgatagttattgttgtttggttgttggaggggttttgggttaaatttttatatatatttttttttaagttttattatttttgttttgtagataaggaatttgagtttttatagagtgttatttttttgtggttatatagtgaatgagagttgtatataggtgagtttacgtttattagattttaagttgggttgtatttaagcgtgtttttgttggacggagtttttttttttttttatgtttattcgttttatgaattagggtttttttatattagggtttataatttacgggtagttttgatttagttttttttatttttagggttgggtgtagtcgggttggatttggggatggagtgggataggttatttttattttttgttttaggagggaataaaaatagaattttagattaatgtagtttttcgcggtatgcgttttttttgtttatatataggttttggtttggggttgtttgttggagaggtttatggtaggtaagttttaattcgaggagatttgttgaggtgttaagttaagtaaattcgaaaggttgttaggaggagcggttttgggagtataggcggttattttattgttgtagagtacggtattttggggatgttttttgggtaatgttatatagttattttttagagagttttagggatatataattagtttagttttattaatagtgagataagggattaggtagatttagatatttttttgtatttgattattatgttggttgttggttaaagatgttagtttttttttggaattttttagaaaggtttttgtagtatttatttatttatttatttatttatttattttatttatttatttatttatttatttatttatggattttatttattttattatttttttatatatttatttatttatttatttaatttatttatttagttttttatttatttatttatttattaatttatttatttgtttatttaatttatttatttattaatttatttatttattatttatttatttatttatttatttatttatttttttatttatttatttatttttttttttatttattttataattttatttttaaattgtgattagatggaaatgggtgtagttagtttgtttttaaaggtttagagcggaggtagagtgaattgtttatttggttttcgtgtttagtagtttaggtttgtatatatgttttataattataggatattagatttagtaattggtagtagaatgagtatagtgtatttttcgcggaattagtattgatagggtatttatttttattaagtttgagtttttttggtgttggagggaatttttagatgggttttaattttagttgaatttattttttagggaaagtaatatcgtgagaaatgcgtgtgatataaggttttaaagagggtgtgggtcgtgatttttggagtaattagggaggttttatggaggagatgaggataaagttgagttttgaaggagggatcggaggacgttgagtagggatatttatttttgtttgcgagggtttgacggtaggttgtgagttgtattttagtttcgatttatttaatttataattttagtaggtaggtgttttcgttttattttatagaggaggaagcgaggtttagggttgggtaaattgtttaaggtcgtatagttgcggaatttatttttagtatttttagtttgttttagttatgttcgtgattttatttagtattttttttttggtgtttatttattttgtttattgttaagtaataaaaattttattaggaaaatttaggggtttttggttagtttttttagatagaaaggtagatttcggcgtagatttttaggaagtaaggatggaagggttagtatttgttttttagaaatgatagtttttttaagattaggagagatggtttagagtgtagtttcggtgggttgtttaggattaggaggggagaggagcggggaggaggatgaattttatttttaaggttgttgagtggtatatagtgagtttggattttttagttttagttgagtttatttttacgatggttatgagtattttttttatatattcgattggaagtcgtattgtatataacgtatacggggttattattttttgttttatatatttttacgtatatattattagtgtattattgggatattttgttgttcggggttgagagtgaattagaattttgtttataaatttagtatattttattgtggaaataatggggggtaaggaggggtcgtttagtaaagaataggatatacgtttttgaggatggagttatttttggttgagatatttttgtaggggatgtcggcgataaaggttgttttatttttttttttgggttagatggatattatttttgttttttgttttttagtattaggtaaaaggaaaatagaagaggttttatttaggttaaatattttagggttttttattcgtaggaaatatgttggtttattttttttaaatttagtatgggggtggagaaacggtggggaaaatagtatttgttttagattttttgggtggagtttttgttttatttatattgtttatttttttgattttttaaaatgggtatttggtgtttggtagtttttggtatagagaagacgtaaagtaaatcgtttataagaagggggcgagcgtagtttgagtattttttgtttttgaataaattgttaggtttagcgtagtcgttgtcgttattgttgtttttaggaagggatttttggttacgagcggttttagtttagttttttggatttaattatttaggtttgtgtttgagtttagtaaagaggtagttagaaaagtttttaagatatttaacgatttcgtggttttagttgagaagtgagttatttttatgtgattttaaaataaaatatatttagaaggagagaagataattgaaatttagttgtttggagttattttagatgaaagtatttgagtttttgggaggtaaaggaggtaggaaagtttggagttagatgattagaatttgaacgtagatttcgttaggtttttgttgtgggttttgggagatgatttttattttttgagttttagtttttttggggatagagatggtgtttatttataggttgtttcgagttaatgaggttatatggcgtaagtattagtatagtgtttggtataaaattaaaatttaataagtgatattattattattattattattattattatttttgagatggagttttgttttgttatttaggttggattgtagtggtacgattttagtttatcgtaattttcgttttttaagtagttgagattataggtatttgttattacgtttcggttaatttttgtatattcggtagagatagggttttattacgttggttaggttggtttcgaattgattttaggtgatttgtttgttttagttttttaaagtgttcggattataggcgttagttatcgttatttggttgtgatattattataatattaatattataatagttggttaggtatggtgatttacgtttgtaattttagtaatttgggaggttgacgtgggttagttattcgaggttagttcgagattagtttgattaatatagggaaattttatttttattaaaaatataaaaattagtcgggcgtggtggtattcgtttgtaattttagttattcgggaggttaaggtaggagaatcgtttgaatttaggagacggaggttgtagtgagtcgagattatattattgtattttagtttgggcgatagagtaagattttgttttaaaaaataataataataaataaataaaatatattttgacgagatatggtaaaagatagtagaaggtaggagttcggggatttattatgggtcggcgttttaagtagaaagaaatgtagtgtttataagttagagagtagatgtcgaagataggagacgagcggggttttttggttttggagaggaaagggtgagtttaggtagaaagagtaaatttagggcgttttgtgtagtgttttttttgtggaattagtttagggtattagtagtatagtttttttttagtagtggagattaggttaattgtttagtgttttttttgtttttttgttttaattttattaagtatagtttttttttgggtatagtagttttgtaggggtggatattgatttatgtatttaggagtttagaggtttttttttttttatttatttatttagagatggagtttttttttgtcgtttaggttggagtgtagtggtattaatttggtttattgtaatttttattttttaggtttaagtgatttttttgttttaattttttgcgtagttgggattataagtatgtattattacgttcggttaatttttgtatttttagtagagatggggttttattatgttggttaggttggtttcgaatttttgattttgtgatttttttattttggttttttaaagtgttgggattatagacgtgagttattacgttcggttaggggttttttttaatggattttttttaatgtatataatttggggaatttagatataagaaagatatagagtatgaaggttttttattggtttgtttatttttagaggtggggttttaggtggtttaggttggttttaaatttttggttttaagtaatttttttgttttggttttacgttgggattataggtataagttattacgtttagttatttttttttttatttgggttgttatgttagaatttggtaagttataagatggaaatgtttaaataggtatttagaatttgagtagatattatttgatgtattattgttgttattttaatgattgaaatgtatttattatattcgtttttttaaaggttattttagatttttatagattttatttgtgatgtaagatagttattttaaatttttttgtgggttcgaatagattagatttttgaatttttgggtagagtagggatggggttgttttagaggagggtgatatcgttatatttttgttttgtttttgtgttgataatgaatgaggtttggatagttttttttttattaaaagttatatttttttaaaaaggagttttttaggatgaggcgttatgataatttaattgtgtataaatatttatttttaataatgatagaagttatttatagaaaagaatttatttttggtcgggtacggtggtttaggtttgtaattttagtattttgagaggttaaggtaggtaaattatttgaggttcggagttcgagattagtttgattaatatggtgaaatttcgtttttaatgaaaatataaaattagtttgtatgtttgtaattttagttatttaggaagttgaggtagaagaagtatttgagttcgagaggcggaggttgtagtgagtcgagatcgtgttattgtattttagtttgggtgatagagcgaaatttttttttaaaatatatatatatatatatatatatatatatatatatatatatataaatttatttttatttttttttttgaaatttttgagagaggttaggtgtagtggtttatatttgtaattttagtagtttgggaggttgaggtgggaggatggtttgaggttaggagttggagattagtttgggtaatatagtaagattttatttttattaaaaaataataaaagtttaaaaagtttttgagatagtttttggggaaaggtgggttatggagatttttattttggttattcgtgtttttttcgtttgtttttttgtggtttttttttattttgagtttggggtgggggcggtttgagtttaggatgggggtggtttgagtttggggtgggagcggtttgagtttgggatagggcggtttgagttggggtgggggcgttttaagtttgggttgcgggtattttgagtttggggtggggatgttttgagtttggggtgggggtgttttgagtttgggttgagggtggtttgagtttgtgttgggggtggtttgagttgggatgggggcggtttgagttgggatgggggcggtttgagtttggggtgggggcgttttgagtttgggatgggggtattttgagtttgggatgggggcgttttgagttgggatgggggcgttttgagtttgggatgggggcggtttgagttgggatgggggcggtttgagtttggggtgggggcggtttgagtttggggtgggggcgtttaggatgtataggttttattttttttttttgaggtttagtttgtttataggagttgtgaagggttggattaaagttaaaggtttaaattttagatttatttttagatttagtggataattaaaatatttaagtttatttttaaaggaagttgagataaggagataatggttattttttttttttttttttttttgtttttggtttttgttatttggagttgtgttttgaagaggtatattgggtattaggtttttttggttttgtttttattttttgtttagatatagaataatttttttttatttttaaggttgatacgtggggttgtggattaaagttaatttatttatttatgaggggagtaatttttttgttttaggaatttgtttttataggagaataaatattgtagaaggtattgtttttagtggtggtgtacgtttgtaattttagttatttaggaggttgaggtagaagaattgttagaatttaggaggtggaggttgtagtgagttaatattatgttattgtattttaatttgggtgaaaagattaagattttgttttaaaataaaaaaagaatagtattttgtgttaaggttaggggttttagttattttttttgtgaagcggaaggggtattattagtttttgtgagaaggaaatagtttatttaattataaaatgttaattaaaggaggtagtatattggttttggtgcggtgtcgttggtttttgtttggggtaggaggagggttgggggagagttaaaagttaaagaaggtttatggaggtcgttttttttttggtgattagttttttttttgacggtaagttgttaatagtatttggtttttaggttggggaaggtgagattagtttatatttgtttagggttttgttttgtttgtatgggtagtaggcgtttattttgttagatggttttgtttattatagggtattagtgttagttaaggatttatagagtttttttgtaaaggtttattagtgggtattgggattttgggttttatttatatagggtttttatataaaatataggatgtttagttaaatttggattttagataaataattaataattttttgaagagataaggattttgttgttttatttaagttggagtttagtggtatgattatggtttattgtaattttgaatttttggatttaagtaattttttaattgtagttttttaaagtattgggattgtaggtatgagttattaaggttagtaaataatgaattatttttaggtataagtatattttaagtttgttgtgggatatgtttatattaaaaattaatttttgtttatttgaaatttaaattgaatttattgtcgggggagataatggagtgatggattgatagaggagtatagagatagtttttttaaatttttagttgattaaagtttggtttttagtttttttgggtttttagagatgtattaagggtggaagcgattaggagggagataaaaatattgaagtttgagtgttagtattgagtcgtgtggttttggataggattgttttttttttgagttttagttttatatgttataattggttaataatagttataaagtattcgaagttaatggttgggagtttgttttaggaggtaggtattattaggatgtagagagagtgaggagtttttaaagttagtttaggttaggtatagtagtttatgtttgtaattttagtattttgagaggttgaggcgagagaattatttgagtttagaagtttaaggttgtagtgagttgtaattgtatcgttgtattttaggttgaatgatagagtttttgtttttaaaataaaataaaataaaataaaataaaataataaagttagtttgtgtattggattgtatgttgttttaaagtatttaaagtgagagaggttaggaagtaatgagatgtagaaaggtagggggaggaggtttagaggtattagagaagatagttgatttttatttttatatatttttggggtattttgagttttatttatatatttaggtgagaatttttgtatttgtgaaagtaatttgaggtcgagagaattaataggaaatcgttttattttttatgtagggtttttttataaataaggttgagtcgtagtttattattgtagttgagttttttgtagtagttgcggtggggaaggttttttaggaggtttgagtaatttagaaatatttatagtatattttttagtttttttagaggtttttgttgagatgaaagtgttttggttcgtggttaaagagtttagtatattgggtagttatagtttttattatattgatttggttattaggtttttatgaatttagtgaggggagatgggttttttagggaagtttgttgatttttttatattgttgtaaatgtaaagtttggtgattttattatttttagtaattgtgatgtagtaataataagaatagttatgtttatcgtttattgaaggtatatgatgagttagatattgtgttggtatatgtgatttttggaggtaatatatttttttttaaggaggaaatgattgagttttggagggagggttttttatttggttttaggtttttttttgatttgcgttttttttttttttttcgtttgttttattgtagtttttttggtttttttgttgtttttggaatgtattaagtttgtttttagtttagtttttgtattgttggtttttttttgtttttttaattttaatttagttgttattatttttgtgattttttattatttattttaaagtagttattagttattttttatgtaattattttattttaatttttattatagtttttagttttattttgatagtttttagaattgatgaatttattgattttgtttttttttattgtatgtaaattttaagaaataagagtttttgtttgtttattgttgtgttttagtgtttgttatagtatttggtatgtagtaggtgtttaatgaatatatttttaaaagaatgaacgattggaaggagtttgaaagaacgatggtttgtgttaatagtttatttttaatttttttagacgggatggagattattattatgtaattacgatttttttgagtttgtgtggtggttgacggtaggtgttagtttggttggattaagggatggttggtaacgtatcgtttttgggtgtgtttgtgagggtgtttttggaggagatgggtatgtgagttggtgggttgagtggtaaagatttttttttaatatggatgatattattttattgttagataataaaaaggtagagaaaaggtgaatttttttttttttttggaggtgggatgttttttttttttgtttttggatttagaatttttagttttttagtagttttttaggtttttaaatttttggttttaaattaagagttatattaatagttttttagttttgaggtttgtagatttggattgagttacgatattggtttttttgggtttttagtttgcggacggttttttgtggtatattttggtttttataatggtatgagttaatttttttaataaatttttttttatttatttattatttatttttttaattgtttatttgtttatttatttatttatttattatttattttttatttatttatttattatttatttaattaatgtatttatgtttgtttgtttatcggttatttatatttatttattaattatttatttatttattatttatttgttatttatttagttatttatttatttatttatttattttttttttttttttgagatggagttttattttgtcgtttaggttggagtgtagtggcgtgattttagtttattgtaatttttattttttaggtttaagtgattttcgtgttttagtttttcgagtggttgggattatagatatgtattattacgtttagttaatttttttatttttagtagagatggggttttattttgttagttaggttggttttaaatttttggttttaagtgatttatcggttttagtttattaatgtgttggttattataggtaagagttattgaatttaatttattatttgtttgtttgtttgtttgtttgtttgtgtttatttgtttgtttggttatttattatttatttatttatttgtttgtttgtttgtttgtttgtttgtgtttgtttgtttttatttttttgtttgtttgtttatttagttatttgtttgtttgtttgtttgtgtttgtttgtttttttttttttttgttcgtttgtttgtttatttagttatttatttatttatttattttttattggttgtttttttggagagttttggttgatgtagacggtgttttggtaagtttaggttgttatttagattattgtggagggagtgatttaaataatagatatgtattttttagtttgagaggtttaaagtttcggattaaggtgtcgttagggttagttttcggcgaggtttttttttttggtttgtatttatttttttgttgtgtttttcgttattttttttttgtttataagtgaggggggaggagagatttttggtgtttttttttttttttataaggatattaattttattagattagggttttgttttatgattttatttaattttaattatttttttaaaagttttatttttaattatagttgtattgggagttagggttttaacgtaggaatttaaggggaagggtatagtttggtttataataaatgggaaattatgtttatgattaaattttttagaagatatggtttattagcgtcgttaatgattgtaagtaaaggttagagaggaaaggggttttcgtggggtggggggcggtgggggtagttggtgtcgggaataaggtttttttttttgtttaatagtagggaagtgaggtcggttgtagatgttatttggggtgggaagagaggggagtttttgtttgtatattttgtgtgggttttggtttgattttttttcgtgttttttattttttgtgtttttttttgtgtgggagaaacgtcgatttttgttggtttaggtgtttaggtttttaggtttgttggttttgggttgggtttaattaacgagaggtttgggaggaatttgggaggtggaagtaagggagggcgcgggagttttttattttttttgttttagatagtttttttagtaggagaggtggttttttgtgtagttttagtttttgttagagttttatttttgtttgggtttttagtaggtgattttggtttttggattttggttataggatttttttttttttatttttatttaggggtggtggtggtattttgttgttaatttttaggttatttttataatgttaagaattttttttttatttgtatggtttttttttaaggtattgagaagggttttaattatatgtttatagggttaaatattttttgtaaaatttataaaatggaaaatattttttttataattaattaacgttttcgtttatttttagttttgagtttttgttcgttatatttttttttgtgtgaggtggaaacggaggtttgttgttacgtgggggtttttgttaaggagaagttgaattggaaagatatttagtttggttttggtcgggttatatttatgtagtttttatttatttttatgtatagtttagttattgttcgttatttcggtgtggaaacggattttagtaatattcgttttatttatcgttttaattttatttatcgcgtagaattaaaaattataagatacgaatatattttgcggtgtttggcgtcggaaaaacgtgcgtagtggagagaagtaagatttgaaatgtacgggtttagaagtaaatttgtggaaaattatttttattattagaggtgaagttgtaagtaaaggatttagtttttttaatgtggagttaaaatagaaaagtttttttggttagaaatatatgtataaatgttttatatgtagttagaaattttttttatttttttattttttttttgatgggaattatatttaaaaaaaaagaaaaaaataggatttattagaatttttgtgtattttgaataaaataattgtagtagtattattaattttatgttgatcgttatttttgtatatattttaattattaaaaataaaaataaaatttgattaattaaggagatttattcgttttatttatttatttatttttgagatggagttttattttgttgtttaggttggagtgtaatggtacgattttggtttattgtaatttttgttttttgggtttaagttatttttttgttttagttttttaagtagttgggattataggcgtgcgttattatatttggttaattttttatgtttttggtagagatggggttttattatgttgattaggttggttttaaatttttgattttaagtgattcgtttattttaattttttatagtgttggaattataggcgtgagttattacgtttagtttatgtttttttttgttgttttttttttttttttgagatatggttttatttttttatttaggttggagtgtagtggtatgattacggtttattgtagtttcgattttttgggtttaagtaatttttttattttagttttttaagtaattgggattataggtgtatgttattatgttttgttagtttttgtatttttagtagagacggggtttcgttacgttgttcggatcggttttgaatttttggttttaagtgatttatttgttttggttttttaaagtgttgggattataggtacgagttattgtgtttagtttgattagttttttgttttcgaaatagaaaacgatattataaagttattatattgaagaagtaatgttaaaaatgtgggagaaatagaattttggagatatgattgatagttgattggtatttttttgtatgtagtgatgtttgtgatatttaatagttgtttataatttataatttgttgttatttatttttttattttaaatgaattattgtatttatatttttagagggttgtataagtttatattattttgattttttgttgattgtttttttgttttttgtttggtttttattttttttattatttgtgtaattagtttttcgtttttaagtttttttgttttaaatgtttaagtggattaggtattgtggttttcgtttgtaattttagtattttgggaggtttaggtaggaggattatataaatttaggagtataagattaatttgggtaatatagtaagattttgtttttatatatatataaaaaatataaaaattagtaaggcgtgatggtatatgtttgtagttttagtattttgggaggttgaggtaggaggattgtttgaggttgggagtttaggattagtttgggtaataaagtaagattttgtttttataaaaataaaagaaaaaattaggtaggtatatagtgtgtatttatagttcgagttatttgggaggttgagaagggaggatcgtttgagtttaggagtttaaggttgttatgagttgtgattatattattgtattttagtttgcgtgatagagtgagattttgttttgggaaaaataaataaataaataaataaataaataaataaataaatgtttaagcggtttttattttttggttagattttattatatattttatgaataaatcgtatgtatgagaaaggtgagtagatgaatagggtagggttagggggttaaggggaagattatagattacgtggagcgagattagtggttaaaaattgttaattatagttaggtttggtggtttatgaaggtaattttaacggtcgggtttggtggtttatgttcgtaattttagtattttgggaggtcgacgcgagtttattatttgaggttaagagttcgagattagttcggttaatgtagggaaatttcgtttttattaaaaatattaaaattggttaggtatggtggcgggcgtttgtagttttagttatttgggaggttgaagtaggagaattggttgaattcgggaggcggaggttgtagtgagttgggattttattattgtattttagtttgggcgatagagcgagattttattttaaaaaatttaaaaaaaaaaaaataaaaaattgtagattttaataaggaagagttataggacgatattttaggatgcgggaaaaggttacgttagttttggattttttttgattaatgggtattttagttattaaaggggtagatgcgttttatttaatttttatttagttattagagtataatatagggatgtgttatagatagagatggagattaataggtagaggggtgatggggaggaagattgaggtaagaggaataaaacggggattgtagagggtaggtggtaggagtttgagggttttagaagaaattgttgtataagtaatgagttagtagggtgagtgacggttaggagaggtggtttaagaaaataaagagatattttcgggggtatagatgcgttttgaggggtcgaggaagagatggggaaggggtggttttgtggattttcggtatgattgtcgtggtgaaaaggaattaaagatttcgataaggggatgattttttaaataaggaagttttgggttttcgtagggggattagtagattgagggtaaacggtattttgtttattaaagttttaataaaatgttaaggtaagaatatttgtttggttttgggggtaattttagaaatattagaaaagggatttattatgcgtaatttttttttaattatttggagaaatgtatggttatttaagatagagaaaggtagttaaagtaagtggaggttaggtatagtgatttacgtttgtatttttagcgttttgggaggttgaggtaggaggatcgtttgaggttggaaatttagtattagtttaggtaataataaaataagattttgtcgttataaaaataaaaataaaaattttttgagacggagttttattttttttgtttaggttggagtgtcgtggtacgattttagtttattgtaattttcgttttttagatttaagtaatttttttgttttagttttttgagtagttgggattataggtatgtgttattatgtttagttaattttgtagttttagtagagatagggtttttttatgttggttaggttggtttcgaattttcgatttttttggttttttaaagtgttaggattataggtatgagttatcgcgttcggttgttataaaaattttttaaaaattagttaggtatgttaggcgcggtggtttttatttgtaattttagtattttgggaggttaaggtaggtggattacgaggttaggagtttgagattagtttgattaatatggtgaaatttcgtttttattaaaaatataaaaattagttaggtgtggcggtatatgtttgtaatcgtagttatttaggaggttgaggtaggagaattgttttaatttaggagtcgggggttgtagtgagtcgagattgtattacggtattttagtttgggtaatagagtaagattttgttttaaaaaaaaaaaaaaaaaaaaaattagttaggtatgtagcgtatatttgtagttttagttatttaggaggttgagaagggaggattaattgaaattgggaggtcgagattgggaggttatgattacgttattgtattttaatttgggtaatatagtaagattttgtttaataataataataataaataatgtaagtgggtataagaatttatttatttatttatttatttatttatttatgagatagggttttattttgtcgtttaggttggagtgtattggcgtaatttcggtttattgtaagtttcgtttttcgggtttatgttatttttttgttttagtttttcgagtagttgggattataggcgttcgttattgtatttagttaattttttgtatttttagtagagacggggttttattatggtttcgattttttgattttgtgatttgttcgtttcggttttttaaagtgttgggattataggtgtgagttatcgttttcggttttaagaatttattttattttagtattttggaggttgaggcgagtggattacgaggttagaagattgagattattttggttaatatggtgaaatttcgtttttattaaaaaaatataaaaaattagtcgggcgtgggggcgggtgtttgtagttttagttatgcgggatgttgaggtaggagaatggtgtgaattcgggaggcggagtttgtagtgagcggagatcgcgttattgtattttagtttgggtaatagagcgagattttattttaaaaaaaaaaaaaaaagaatttattttaagatagtaagttttagggttgaagttagtttttatttagttttaggtttaaagttataagtatggttattgtaatatttttatttaggatattattttttaggggtttagatttatattattaaggaggagcgtttatattagtagttggggagagggtggttttttataagatgtaatgtttattttgaagagttattatagtgataattatgaaatttatgtttgagatttaattttaagtgaaaagaatagaatttaatatttattttatggggagtataaaattttgaaaatatacgttttttataattaaattaaattttatgttatgtttttgaggagataagtattgaatggaatatagaagaaatgttatagttaatgattgttgaagttttttttttaattttttgtttatgttgtttggtaataagtaatatagaaaattgataataaaaagtaaaagagaaagaaaagatatagtgtatagtttagattgttttttttaaaaaattaaataataataataaaaagtataggtcgggtgcggtggtttacgtttgtaattttagtattttgggaggttaaggcgggcggattatttgaggtcgggagttcgagattagtttgattaatatggggatatttcgtttgtattaaaaatataaaattagtcgggtatggtgacgtaggtttgtaattttagttatttgggaggttgaggtaagagaatcgtttgaattcgggaggtggaggttgtagtgagttgagatcgcgtttttgtattttagtttgggtaataagagcgaaattttattttaaaaaaaaaaaaaaaaaagtataaatgtaagttgggcgcggtagtttatgtttgtaattttagtattttgggaggtcggggtaggtggattatttgaggttaggagtttgaaattaattcggttaatatggcgaaattttatttttattaaaaatataaaaattagttaggtatggtggcgcgtgtttgtaattttagttatttaggaggttgaggtaggagaattgtttgaatttaggaggtagaggttgtagtgagttaagattgagttattatattttagtttgggtgatagagtgagatttcgttttaaaaattaaattaaattaaattaaataaaataaaaaaaagaagcggtataatataaagtttcggtagttaaagcgttaatttttagttattaggaaggttttgttatttaatgatttatcgttttagttaaggttagttatattttgggtttttgatgttggaggtaatatgatgttaatattggcgagaaatttattattttttttttttcgtttttcggtgtcggtttttgtgtgtatttgtagtttttttattatcggtgtttttatggtgtttacgttatcggtttattttttagtaataattcgatagttcgatatttttgtagattttgtggttatagagttaaagttttttgttattagtgggttttgtagataattttttaaatttttttgggttgagttagttaagtttttaataagttggaagatgataggggttggatgtaatttatttttaattggtttgggttatatggatattattttttttttgggatttgatttgggatggaaataggagttatagtttatgggaaggttgtgaaaggaagtttcggttttagggtgcggattaggttgatttgcggaataaggttttaggggcggtttattcgtttgttttgtttagttttttttggtaattatatttattcggggtttattttaaatttggtaggtaatgttgttgtttttattttagtcgttgttttaatacgtttcgtttggttaggataggtgtttaggtatggtatttagggatattttcggttttcggggtttaatttttggtttttaggtgtagcgttgggaaaagtagagggtttcggttatggcgtaggtttcgttataggttatttaagtagtttgggaggagtcggaaagagagtaatgtatttatttggatagagattgaagttatatttttattgagaaaagatgatatttttgtttggattttttttttgaaattttaggtcggggtggggtaggagttagcgagagagtttagcgttttaaaggggattttttggtttttcgtgttttttaatttagtatttttggggatttatatatttagggtagagtggttatttagggttttttttatttagatataaaggttattgaaggtttcgggttaatatcgttttgaggatgattagcgatttgagtttttgttagagatagtaggtagtttgggtttaagggtcgtttagtgatttgaagttgggattattttatattttttgcgttatttttgttttttgttttggaggtttttaggttgttaatagttatgttttggagaattaggttagattaggttgggaataaagtttagttgttatagagttgtcgagaggttattggtaagtagtgtttaggagtcgttttttttttgttagtaatagtttaatgtttttttttataggggttgtaaatgggtttatgtttagggtggggttagggagataaagtagagagaaattgggttgggagtagagagtgttatgttttattttggagatttaaggttaggttattttgtagagttggtgtttagagtttttagcgtataggagaggaggtaaatagaatttgatatttagtagcgttcggtagacgtttttggaatgaatgattaaatttatatggagagttgaaatgggttaggaattttagggagacgggtagtttatagtttagtagggtcgttttagtagagtaggttaatgttaggttttttggtaaatttttcggggtttaggtataattgttatattaggaaaggggtaggggtgattagtttatcggttacgggggtattttattgtttttatagaagttcggtatttataggtttgggtgatatacgatttttatgtttggtattacgatggttgtttattaagtttttttatttattaggattgattttttttggttagcgattttagattattatgatttggtagttgtcgttaggtttgtttggttaaggattttttcggagattgagttattttatatagtaaagtgagttatggggttatagcgttgtgtgttgtgtataagtttcgagggttttatttagggattggtatttattgatttttataaatttttggtaatcgtttagagttgggatgtttttaaggtaatagttttaataaatagaggcgtaggaatttagcgcgttatttttcgttttattttaaaggtttatatttttaggggtttggagtttttttttggagttttttttattttaaagttagttggatttgtttaggaattgttattattattttttggtcgggtttgtattgatgtgtattgaattttttttattaggtttattttaggtaaattttagagtttacgtaatattgtttgtggataaatattggggcggaaataggggttatttttaggttttagttatatggggttgttagggttgtttgggatggtaggagagtgttagaggagggtagtttaaggattaggtagggggtgggaagtgtttttttttatgggtttttaagtgagatgttttttgtaaatatttatttgggatttttaagtagagggttggtttttatgttatttggatttggattttagattattgtttttaagtggtaattttgggtttttttgtatttgttttggtttgagttggttatatttgtggggggtggttttaggaagaaggtggattgtcgtaaacgtaatgtttcgttgttaggtgtattgttttcggttattagaatttttttgggtaggtcggggagatttgacgggtaagtgtttgcggtttggcgtgagcgggtagggtaggtggtttttgtttgggtatgtttttttatttttgtaatagattagggagagggttggttttaggatttaggtttagttagttgttttataattgaggggtttcggcggaggatataagttagatagagttatagattaatcgtacgaggtggttttttttttttagtttaggttttttgaatgcgttagagtagataagtttggacgtgaggaggtaagaggtagcgagaataggcgcggagacggggttgggggagaagaggaagaaattttgtgtttgtgttttttttacgttcgtttgttatcgggttagttgattggggaagtgttttttgagggtgtaattttttgtttttttcgtaagttagttttcggggcgttgggtgagggtgtagttttgtttattacggcgagttagtatattgaattacggtagaagttgttttttgtgtgggtgtagtttttttttttgtttaggatttagaagttacgatagtatagagttttttaatcgtggttggtgtttttttaggaattttttgaaagttatagagaaattttagagtggttgggtacggtggtttatgtttgtgattttagtattttgggaggttgaggcgggtggattatttgaggttcggagttcgagattagtttggttagtatggtaaaattttatttttattaaaaaatataaaaattagttgggtacggtggtatatgtttgtaattttagttatttaggaggttgaggtatgagaattgtttgaatttgggaggtagaggttgtagtgaatcgagatcgtgttattgtattttagtttgggtaatagagtaagattttattttaaaaaaataaaaaataaaaaaagaatttttagagtaatttttaggtgttagtaggggtgtgacgtaattttagtttcgtttttgtggtttatcggtttcgggtaagtttttttgtcgttgttatttatagagagtttttaggggagtttgggaatgacggtaagttttatgtgatttagtatgtaaagggagttttaaaatttagaatttagagagttagggcgggtatagtgtagttggttttagtgttgaggggttgggggagagattttgtattatgttttgattatagtaagggaagattatggaggtttttggaacgttttagtaatggcgtaattttagttttttttatttttttgttaatgataattatgattatgatagtagttaataggttatagagtaggtattttttagtttttttaaatatgaattcgtttaatttttataataatatagtattgttttatttaataaatgaggtaggttgggcgtggtggtttatgtttgtaattatagtattttgggaggttaaggtaggtagattacgaggttaggagttcgagattagtttgattaatatggtgaaattttatttttagtaaaaatataaaaattagttgggcgtagtggtacgtttttataattttagttatttaggaggttgaggtaggagaattatttgaatttgggaggcggaggttgtagtaagttgagattatgttattgtattttagtttgggagatagagtgagatttcgttttaaaaataaataaataaataaaattaaaaaatattatatatataaaaaaataaatgaggtaaatgagatgtatgaggtgagaattttgtgttatagggagaggcgtagtttggtgagatttaattttaaggggttggcggttttgagtttttaagtgtaattattggattatattgtttgtagattattattatttttattttattggaaggtcgggtgaggtaatcgggaaagtttggagtagtagtggagttgttagagagaatttgtttttagtgtttttttggattttgtagttgttttgtgtgggtttttgttgtttttcgtattggaaaagatttttttatagatggggttttatgacgttatttaggttggagtgtcgtgtttatttttaggcgttgttatagggttgtagttttgaatttttggttttaagcgatttttttgttttagttttttgagtagttttttgggtttaagcgattttcgtgttttagttttttgagtagttttttgggtttaagcgattttcgtgttttagttttttgagtagttgggattttaagcgtatttggttaagtttttttttattttttattatttaagatttttttttttttaaggtttagtttaattttatttttatttaaaattttcggggtatttttgtagtatttggaggttgaattgtttaggagggaagggtgttaatgagttggtgtttcgtttttattttgattttcggtgagaatgtaagttttttgtaggtaaggattatattttattattatttttgtatttatttagatttggttatgtgtgtttagtatataaagtgttttcgatgattgtttatagatttacggtatttgagattgttttaatatatttttttaaaattttttttttttttagaggtttacgaatgtttaaattaggtttatcgggaataatattatggttatttcgtttattttgaagtttatatataggtttggaagtaataatttcgtatagtttagatgaaaaaataaagatttttttgttgtttttggattgttagagttttgggggatttttaatattttttgttgttttttttaattttatggtgtcgatggtttgttggggggttagtttgatttttgcgagtgttcgtattcggaaaagggttggtgttaagatagttttaggatatttagaatgagggtaagaggttatttttattattagttttttttagttttattttatataattgtaatatagtgatttagtatattttgggttattgttaagtagggagtaaattagaaatggtttgagttttttttttttttatttttagaggggtttgtttttttaggtaaatataaggaggtatcgaggttgttgtataagagttggtttttgtttattttataaattttatttttatttattgtaaaaggttttgtttttttttttaaaaaaaaaaaaaaaaaagaaatttagtgaggggtggggtaggtgtgtgtggaggagaggagaaaaggataagtgatggtttttttattttttagtaagtcgtaggtgtagagattttaagtttgttttagggttttttcggtatttgtgtaggagggttttcgtagaaaaaatttaggatttacgatttgggaggatttcggttatttttattgtttggatttattagtgggaggtaaagtgtaagaaattaagggtaaagggttttttttgggcgggttagagattttttggaaagggttatgtatcgcgcgatttttataataattttaagtatttggagtatgttggggaggaagtttcggtgttaaaattaagtatgtgttatttggaagttcgttttcgtttattagtatattaatttatttacgtttttgatagagttgtgtttcgggtgcgtagagggttattttgttcgtaataatcgggtgaaagttgaaattttaagttattgatttagaagggtattttcggggaagttttgagtaattttttttgagataaggtattttattatttattttggtttttaaatatggaaagttagaggaaatcgataatggtttaaaggtagggggatggtttcgatgatttttttatttttaattaaggtttatgattttgtttttttattaataaaaattaatttatggatttttggtaggtatttttttatttgaatgaattaaaggagggatattaaataaacggtttttagatttagaagaggagacgttatttataatttgaggattgaggaggataaaggattttgtttgtttggattttttggagaaaattataaaggaaaaaaaaaaggaaggaaaagataaataatgaagatttggattttttttaatttgtttttgtggtttcggtgtgtttatttgtgaaatggaattttagagtgttagagcgggagttttttatgaaatgaaagtttttgaatcggtttatggtgaggtttaagttaggtttttttcgtttatttaaggcgggttttgttagggtggagtgaggatgttagtcgcgggcggcgttttgagcgtaaaacgtgaattcgagtcgttaagtttgggcgttgttggacggttttatttggaggtcgtttcgtgttttattaagtagaggagaaatcgaagagaattcgaagaaaggatgttgcggtttggattattagttttagaggttgaatttaaggatatttttttatttagtttcgattttatttatttatatagacgtatagggatttaaagtattcggtcgatttggaaagttagcgatttttgcgagggtgtaaggggcgaggaagagggagcgttttttagggtagttttttcgatattcgagtaagggttggagatagcgtaggggacggtcggtttaggtcgaaagcggttcgatagcggttttgttttgggaggaattcgatttgtagtgtgttcgtcgcggggattcgtttagtttcgggggcgtttcgttattttcggtcgtaggtatttaggtgagtagcgttggtttcgggatatcgatttttttttatttcgggcgcgaagtttatttgagtaagatttttttatggtgttttcgtggtcgtcgtttttaggaaagtgtggcggcgaggtagcggggcgcgcgtttttagggcgttaattttgggtcggtagtaggaaggcgggaagagggggcggttcgtcgtttggagtgtatcgatcgggtttcgtttcggtttcgttttcgtttcgttttttttcggagatgcgtatagaatttcggtttagtcggttgtggtttcgtttttgattcgtttttttttcgtttcgtgaacgtgcgcgtcgagttttattttcgtttatttttgcgttgcgttgtatttggcggagcggggttggcgggcgtcgggtttgggagggggcgttttcgcgcggtagcgtagattagattagattaggttaggtcgggggtgggggtcgtttgcgtggttcgtcgcgttcgtagttttgtatttttagtttttcgcgttggcgttaatggttggtttcgggagtcgtcgtattttttagtttcgagttcgggcggggcgggttcggttaggtggaagcgggcggaggtgcgggcgtttcgggcggtttcgtcgggcgaggcggcggcgtcgggtatcgcggcggcgtcgggtatagtcgggggtcggagtcggggtgtcggtttagtgggtcggggtagggcgggataggatatttgttttgttatttttttggtaattaaaagggtagagtgcgtcgattgagttggagttttagtttttttatttgtaaatgggcgcgttggatagatgattatttgttttttttgcgttgggtatcgtgcgtagttcggtgtatcggtgtagcggggtagatatagggagtcgttttttataattcgggtaacg

SEQ ID NO: 39 - DNA, 1405 bp, Artificial Sequence
  chemically treated genomic DNA (Homo sapiens)
cgttattcgagttgtaaagggcggttttttgtgtttgtttcgttgtatcgatatatcgagttgcgtacggtgtttagcgtagggagaataaatgattatttgtttaacgcgtttatttataggtgaggaaattaaggttttaatttaatcgacgtattttgtttttttgattattagaaaagtagtaggataggtgttttgtttcgttttatttcggtttattaagtcggtatttcggtttcgattttcggttgtgttcggcgtcgtcgcggtgttcggcgtcgtcgtttcgttcggcggggtcgttcggagcgttcgtattttcgttcgtttttatttggtcgggttcgtttcgttcggattcgggattgggaagtgcggcgattttcggaattagttattggcgttagcgcggggagttgggggtgtagagttgcgggcgcggcgggttacgtaggcggtttttattttcggtttggtttggtttggtttggtttgcgttgtcgcgcgggggcgtttttttttaggttcggcgttcgttagtttcgtttcgttaggtgtagcgtagcgtaggggtgggcgggggtggggttcggcgcgtacgtttacggggcggggagggggcgggttaggggcgggattatagtcggttgggtcggggttttatgcgtattttcggggaggggcggggcgggggcggggtcggggcggggttcggtcggtgtattttagacggcgggtcgtttttttttttcgtttttttattatcggtttaggattagcgttttgggagcgcgcgtttcgttgtttcgtcgttatatttttttgggagcggcggttacggaggtattatgaagaagttttatttaggtgggtttcgcgttcggggtggggaggggtcggtgtttcgggattagcgttgtttatttgagtgtttgcggtcgggagtggcgaggcgttttcggagttgagcgagttttcgcggcgggtatattgtaggtcgagttttttttaggatagggtcgttgtcgggtcgttttcgatttgagtcgatcgttttttgcgttgtttttagtttttgttcgagtgtcggaggggttgttttgggggacgttttttttttttcgttttttgtattttcgtaggaatcgttgattttttaggtcggtcgggtgttttgggtttttgtgcgtttgtgtgggtgaatggggtcggggttaggtggaggggtgtttttgggtttagtttttagggttggtggtttaggtcgtagtatttttttttcggatttttttcggttttttttttatttagtggggtacgggacggtttttagatgggatcgtttagtagcgtttaaatttggcgattcgggtttacgttttgcgtttaggacgtcgttcgt

SEQ ID NO: 40 - DNA, 1405 bp, Artificial Sequence
  chemically treated genomic DNA (Homo sapiens)
gcgggcggcgttttgagcgtaaaacgtgaattcgagtcgttaagtttgggcgttgttggacggttttatttggaggtcgtttcgtgttttattaagtagaggagaaatcgaagagaattcgaagaaaggatgttgcggtttggattattagttttagaggttgaatttaaggatatttttttatttagtttcgattttatttatttatatagacgtatagggatttaaagtattcggtcgatttggaaagttagcgatttttgcgagggtgtaaggggcgaggaagagggagcgttttttagggtagttttttcgatattcgagtaagggttggagatagcgtaggggacggtcggtttaggtcgaaagcggttcgatagcggttttgttttgggaggaattcgatttgtagtgtgttcgtcgcggggattcgtttagtttcgggggcgtttcgttattttcggtcgtaggtatttaggtgagtagcgttggtttcgggatatcgatttttttttatttcgggcgcgaagtttatttgagtaagatttttttatggtgttttcgtggtcgtcgtttttaggaaagtgtggcggcgaggtagcggggcgcgcgtttttagggcgttaattttgggtcggtagtaggaaggcgggaagagggggcggttcgtcgtttggagtgtatcgatcgggtttcgtttcggtttcgttttcgtttcgttttttttcggagatgcgtatagaatttcggtttagtcggttgtggtttcgtttttgattcgtttttttttcgtttcgtgaacgtgcgcgtcgagttttattttcgtttatttttgcgttgcgttgtatttggcggagcggggttggcgggcgtcgggtttgggagggggcgttttcgcgcggtagcgtagattagattagattaggttaggtcgggggtgggggtcgtttgcgtggttcgtcgcgttcgtagttttgtatttttagtttttcgcgttggcgttaatggttggtttcgggagtcgtcgtattttttagtttcgagttcgggcggggcgggttcggttaggtggaagcgggcggaggtgcgggcgtttcgggcggtttcgtcgggcgaggcggcggcgtcgggtatcgcggcggcgtcgggtatagtcgggggtcggagtcggggtgtcggtttagtgggtcggggtagggcgggataggatatttgttttgttatttttttggtaattaaaagggtagagtgcgtcgattgagttggagttttagtttttttatttgtaaatgggcgcgttggatagatgattatttgttttttttgcgttgggtatcgtgcgtagttcggtgtatcggtgtagcggggtagatatagggagtcgttttttataattcgggtaacg

SEQ ID NO: 41 - DNA, 1818 bp, Artificial Sequence; identical to SEQ ID NO: 14
  chemically treated genomic DNA (Homo sapiens)

SEQ ID NO: 42 - DNA, 1818 bp, Artificial Sequence
  chemically treated genomic DNA (Homo sapiens)
cgcgaacgtaaaacgtaaaattttaatatcgataattaaaaaaacgtaaaaaaacgtacgtatttataaatttaaaaacgcgaacgttaaatttaaatttaaataaaataatttcgtaaattttaatatattttataaatttcgaaaataaaaaaaaattaaaatattttttttattcgtacgtaaattttttttattttttacgattcgattttaaaaaacgaataaaaatatttttaaatttaaataaaaattataaaatattttattttaaattttattacgatttaaattatattcgttcgatattttcgatttacgaattatataatttaacgatttcgaaattaacgtaaaaaaaaaaaaaattatttattcgaataaaacgcgattatttatttaatcgaaaataaaaaacgatttttttatttcgttatcgaatttaaacgaaattcgaaaatcgtcgaaaaaaattaaaaaaaaaaaatcgataaattttttaaaataaaattatacgttttaaaaaatttcgaaataatttcgcgaattttcgaaaaaatcgttatcgtttaataaatataaataataataaaaaaaaaaaaatttaaacgataatacgtaaaacgaatataaaattttataaaaacgcgtaaaatttacgcgaatatttttaataaaattttttacgtaaacgacgcgaatacgaaatcgaaaacgcgcgacgtttttaacgaaaaaacgtttaaattaaaaatttcgtttttttttaacgtattttcgtttttttttaacgtattttcgtttcgcgttaaatttattcgtaaaattttttttaatacgttcgcgatcgtaataattaatttaatatttattttcgaaattcgaaataattttatttaattacgcgttaatcgcgaaattcgatataataattaataaataacgaatcgcgcgaaaaataacgacgaaaaaacgttttcgacgaaattcgaattttacgcgttaattaaaacgtcgcgttcgcgtttttataatataaaattaatcgtcgaaaaaatttttaaattttttaatttaattaaataaataaaaaaaaaaaacgaacgtcgattttttttcgcgcgttacgttttcgtttcgttttcgtttttcgaacgaattaaattttcgtattcgtatcgatttttttatttcgtattaattatttcgttcgtttattaaaattaaatttaaaaaattaaaattcgaataatcgttaaaaaataattttaaatatacgatcgaaacgtttttttttttttcgtttaattcgcgtttaaaaaacgacgaaaaacgcgattttaattttttttttcgaacgtttcgttacgattaaatataaacgaatataaaaatcgaattataacgaaaaaaacgaacgtttaaaaaaaaaaaaattttttttttttttcgaacgtaaaatttttttataaaaaattatatttaaataattaaataaaattttttattatcgtcgtcgcgcgttttacgtttataaaaattaaacgataacgtacgcgattaataaataaaatttcgatttataaatttaaaaatcgaaaaacgtaaaacgaatatacgaattttataatattaacgaaaaattattaatttttatttatcgaaaatatttttataattaatatttttattacgattatcgtttcgaaaattatcgttatatttttttaaataaattttaaaaaaaatattattcgaaaaaaaaaatataaaacgaaaataaaatacgattattaaaaaaattaaaaacgaacgacg

SEQ ID NO: 43 - DNA, 2519 bp, Artificial Sequence
  chemically treated genomic DNA (Homo sapiens)
gatttatgagtgaatgattaaaagtgtagttgagttttggtagagggtatggggttttatttagagataggtagagaaagttgaagttttaggattggaggttgtttttttttatttttttattaggtttaggtagggtttgatttgaatggaggtttgggaatttgtggttagtttttatttgttggaaaagagtagtttttaagtttaattgttttaggttgatgtttttttatttttttttatttatttatttttattattattttttttttattgagatggagttttattttgttgttaggttggagtgtagtggtgtgattttggtttattgttatttttgtttgttgagtttaagttttagttttttgagtagttttttgggtagttgggattataggtgtgtgttattatgttaggttaattttttgtattttagtatagatggagttttattattttggttaggatggttttgattttttgattttgtgatatttttgttttggtattttaaagtgttgggattataggtatgagttatagtgtttggtttttagttttttttaaaaaatgttagatttgtttgttgtgttgagtggaggtggggtaggtttttgttttttaattggttttatttattgagttttttttttgtgttgggttttgtgttaagtatattatatgttgtattttgtggttaggttgttgtggtttagggttgtattttggtttaaggttgtaaattgaggtgggattttgatttggtaattatgtttgtggtttggaaatggtgttttttgaggtttaggagaggttgggtggtgagtggttgtggagttgagtgtgggtagtgtggatgttgtttatgggggaggtagttaaggatggagggtgagaggtggtttttttaaggttatttttttttgggttgtaagtaaaggttaggggattttggaatggttagtgtaggagtttttttgtgttttttatgttttagatttttagagttttagaaatggagattattgtttttatttttattttatagatgaagaaattgagttgaggaaaggaagtgatttggttaaggttggagagtttattttttgtagggtggggtttggaatttggggtttggtttttggtaatgtgtttttggtttgtagttttttgttttttgtgttttgttttggtttttagtgtagttgtagaggggttttttttgatgtatatatttaagagtttgattgtgtggttgaaattgtggagtttggagttgtggttggttgagtgattgtggtttttgggttgtgtgtgtgttttttggagttgaaaggagtgttaggattgggggtgttgtattgggttgggttttttaatgtttgtagattgggttgggttgtagttggagatggtagtaattttgggaggtttttgggtttttttagggtgtgtttaggaggtgggttttgtgtgatgtggtgtagtttatttttttttttgagattgtttaattttgtgggggtagttttgggtgtttggagatgtggaggtttagattgtagtttttggatgttggaagtttagattttttggggttattggtttttttgttattttagttgtagagagttttattgttttattgtttggagtttagtttttttgtttttttattagtttttttttttgtaggtttttggggatttttgattgtttgtttttattttttttttgtttttatattttttgtttttgttttaggaatggtgatatagttattggattgttttttattttttgttagtttatattgtatataatttaataatttgtgtttttttatttgggtgatagagatatagataatttgagttagtggtgtttaaagtattggttttagaatagtagtattagtattttttgggaatttgttaaaaatgagaatttgggttgggtgtggtggtttatgtttgtaattttagtattttgggaggttgaggtgggtggattatgaggttaggagattgagattattttggttaaaatggtgaaattttgtttttattaaaaatataaaaaattagttgggtatagtggtgggtgtttgtagttttagttatttgggaggttgaggtaggagaatggtgtgaatttgggaggtggagtttgtagtgagttgagattttgttattgtattttagtttgggtgatagagtgagattttgttttaaaaaaaaaaaaaatgtgaatttgggggttttattttagatttattgaatagaaattttgtggagtttagtagatgatttttatgtatattaaagtttgtgagttattgatttaaatatttttttatttatttattttttatttggtttatttagtattgttagtgggagagatatttgtaaagtattaggttgtgagttttattgttgtgtattttgagatattgtttattagttttgggatggtaggtagaggtattttagtttggtttagtgtagatt

SEQ ID NO: 44 - DNA, 2519 bp, Artificial Sequence
  chemically treated genomic DNA (Homo sapiens)
ggtttgtattagattaagttggagtatttttgtttgttattttaaagttagtggatagtgttttagagtgtatggtggtggggtttatagtttggtgttttgtgggtgttttttttattggtaatgttgggtgggttaggtgaagaatgaatggatgaaagaatgtttagattagtggtttgtaaattttagtgtgtatgggaattatttgttgggttttatagagtttttgtttagtagatttggggtggggtttttaaatttgtattttttttttttttgagatggagttttgttttgttgtttaggttggagtgtagtggtgggattttggtttattgtaagttttgttttttgggtttatgttatttttttgttttagttttttaagtagttgggattataggtgtttgttattatgtttggttaattttttgtatttttagtagagatggggttttattgttttagttgggatggttttgattttttgattttgtgatttgtttgttttggttttttaaagtgttgggattataggtgtgagttattgtgtttggtttaaatttttatttttaataagtttttaagagatgttgatgttgttgttttgggattggtattttgagtattattagtttagattatttgtgtttttgttatttggatggaagggtgtggattattgagttgtgtgtagtgtagattaataggagatggagagtaatttggtgattgtattattgtttttgagataagggtgggaagtatgggggtagggggagagtaagaataggtggttagaagtttttagagatttgtggagggagggattggtagaggaataaggagattaagttttggatggtgaagtaatgggattttttgtagttggggtggtgggagagttggtgattttagggagtttgggtttttagtatttggaggttgtagtttgggtttttgtgtttttgagtgtttgaggttgtttttgtgaagttaagtggttttgggggggggggtgggttgtattgtgttgtatggaatttgttttttggatgtattttgaagaggtttggagattttttgggattgttgttatttttagttgtagtttggtttggtttgtgagtgttgaggggtttagtttggtgtagtgtttttgattttggtgttttttttagttttaaggggtgtgtatgtagtttaggaattgtgattgtttagttagttgtggttttgagttttgtgattttagttgtgtggttgggtttttgagtgtatgtgttgaggggggtttttttgtagttgtgttgggggttgaagtggggtatagggggtaggaggttgtgggttgagggtgtgttgttgagagttagattttgggttttaaattttgttttgtaaagaatgagttttttgattttggttaagttgttttttttttttggtttagtttttttatttgtaaaatgggggtggggatgatgatttttgtttttgaggttttgaggatttaggatgtggaaggtatagagaagtttttgtattaattattttgggattttttgatttttgtttgtaatttggaagagggtgattttggaagaattgttttttgttttttgtttttggttgttttttttataggtagtatttgtattgtttgtgtttggttttatagttgtttattgtttggttttttttgggttttaggggatgttgtttttgggttatgggtgtggttgttggattggagttttattttggtttgtgattttggattagggtatgattttggattatagtaatttggttgtaggatatagtgtgtgatgtgtttggtatagagtttggtataagggaagagtttggtggataaggttaattggagaatggaggtttgttttgtttttatttagtgtagtggatggatttagtgttttttaaaaagaattaggggttgggtgttgtggtttatgtttgtaattttggtattttgggatattgaggtgggagtattatgaggttaggagattgagattattttggttaaagtggtgaaattttgtttatattaaaatataaaaaattagtttggtgtggtggtgtatgtttgtagttttagttatttaggaggttatttaggaggttgaggtttgaatttagtaggtggaggtggtagtgagttgagattgtgttattgtattttaatttggtaatagagtaagattttgttttaataaaaaaaaaataataataaaaataaataaataaaaaaaagtagggaagtattaatttggagtaattgagtttaaggattgtttttttttaataagtaaaggttggttataggtttttaggtttttgtttagattaagttttgtttgggtttggtggggaggtgaggaagaatggtttttaattttgggattttaattttttttgtttgtttttgggtgggattttatgttttttgttaggatttagttgtatttttagttatttatttataaatt

SEQ ID NO: 45 - DNA, 2283 bp, Artificial Sequence
  chemically treated genomic DNA (Homo sapiens)
aatgaagatgttggagattgggtttttgtttgttttttttttgtgttttgggatgaggtagagattgaatagttggtgagtaaattaatggtatttagaaagttatgttggatttggtgtttagtgtttaagtgttaatttgttgaaagttttttagtgaaattttagggatgatttggattttgttgagaggaattgtttttgagtgagatggttttagaggtttggaggagtggattggtaagtattgggagggtagtgggagttttgtttttgtttggtgttttgaataaggtttttatggttatttattatgagattttggaggaaagagagaagggttttgttgtgggtaatgtggttgtgaattttggtttggattttggtagttttttagtttgtaggttttgggtggtgtttggagttagttgaagattttttgaggtgaattgggagattggagagatgtttgtgaatgattgtttggattgagaggagttgtgtgggatattgtttttttgtattgtaattttggagttggtagtggagaatttgttggagttgtttagtgtggaagtggtgatttaggatattaatgataataattttgttttttttatttaggaaatgaaattggagattagtgaggttgtggttttggggatgtgttttttgtttgagagtgtgtatgattttgatgtgggaagtaattttttataaatttatgagttgagttgaaatgaatattttgtgttttgtgtgtagatgtgggaggatagtattaagtatgtggagttggtgttggagtgtgttttggattgagaatgggagtttagtttttagttagtgttgatggtgttggatggagggattttagttttttttgttagtttgtttatttatattaaggtgttggatgtgaatgataatgtgtttgtttttaattagtttttgtattgggtgtgtgttttggaggatgtattttttggtatgtgtgtggtataagtttttgtaatggatttggatgaaggttttaatggtgaaattatttatttttttggtagttataattgtgttggtgtgtggtaattatttgttttagattttgtaattgggatgttgataattaagggttggttggattttgaggatattaaattttatgagatttatatttaggttaaagataagggtgttaattttgaaggagtatattgtaaagtgttggtggaggttgtggatgtgaatgataatgttttggagattatagttatttttgtgtatagtttagtatttgaggatgtttttttggggattgttattgttttgtttagtgtgattgatttggatgttggtgagaatgggttggtgatttgtgaagttttattgggttttttttttagttttatttttttttttaagaattattttattttgaaaattagtgtagatttggattgggagattgtgttagaatataattttagtattattgtttgagatgttggaatttttttttttttagtttttataatagtgtgtgtttaagtgtttgatattaatgataattttttataatttttttaatttttttatgatgtttatattgaagaaaataatttttttggggttttaatattaaatttaagtgtttgggattttgatgttttgtagaatgtttggtttttttttttttttttggagtaaggagttgaaattgggttagtgggttgttattttataataaattgtgataatggtatagtgttatttttagtgtttttagattatgaggattggtgggaatttgaattaatagtttatattagtgatgggggtattttggttttagttattaatattagtgtgaatatatttgttattgattgtaatgataatgttttttaggttttatatttttggttaggtgggagtttggtggagatgttgttttgaggtattttagttggttatttagtgttatgggtggtaggttgggatgtggatgtagggtataatgtttggtttttttatagttttttgggattttttaattagagtttttttgttatagggttgtatattggttaaattagtattgtttgtttagtttaagatatagatttatttaggtagatttttatggttttgattaaagataatggggagtttttgttttttattattgttatttttattgtgttagtaattgaggatttttttgaagtttgagttgagtttttttttggttttgttttttgggagtagaaaaaaaattttatt

SEQ ID NO: 46 - DNA, 2283 bp, Artificial Sequence
  chemically treated genomic DNA (Homo sapiens)
ggtgagattttttttttgtttttggggggtagagttagaggggaatttggtttgggttttaggagagtttttggttattgatatagtgagggtagtagtggtggagagtgaaggttttttattgtttttgattaagattgtgagagtttgtttgggtgaatttgtgttttggattggatgggtagtattgatttgattagtgtgtagttttatggtaaaaaggttttggttaggggattttaagagattgtaggagagttaggtattgtgttttgtatttgtgttttagtttattatttgtgatattaggtggttagttgaggtattttgaggtagtatttttattgagtttttatttggttgaggatataggatttggggggtattgttattgtgattagtgataaatatgtttatgttgatgttggtggttaggattggggtgtttttattgttgatatgagttgttaatttaaatttttgttgatttttatagtttaggggtattaaggatgatattatgttattgttatgatttattgtgaaatagtgatttattagtttggttttagttttttgttttaagagaaagaaagaaagttgagtattttgtggggtgttggggttttagatatttaggtttagtattggagttttggggaggttgttttttttaatgtaaatgttgtaggaagattgagaagattgtggagggttgttattgatgttggatatttgaatatgtattattgtaagggttgagagggaaggggttttggtgttttgggtggtgatgttgaggttgtattttggtatagttttttgatttaggtttgtattggtttttaaagtgaagtaatttttgagggaagaagtaaggttgaaagggagatttggtggaattttgtaggttattagtttgtttttgttagtatttaggttagttatattgagtaaagtgatgatagtttttagaggggtatttttgggtattgggttgtatatggaggtgattgtgatttttggggtgttgttatttatatttataatttttattaatattttgtaatgtgtttttttgggattggtgtttttgtttttggtttggatgtaaattttatggagtttggtgtttttgaagtttagttgatttttgattgttagtattttggttataaggtttaaggtgaatagttgttgtatgttggtgtggttgtggttgttgaaggagtaaataattttattgttggggtttttatttagatttgttgtaaggatttgtattatgtgtgtgttggagggtgtattttttaggatgtgtgtttggtataaggattggttgaagataggtgtattgttatttgtgtttagtattttgatgtgaataggtaggttggtggagagagttggggtttttttgtttaatgttgttagtattaattggagattaggtttttgtttttggtttagggtgtgttttaatattagttttgtgtatttggtgttgtttttttgtgtttgtatgtgaagtgtaaagtatttattttggtttagtttataggtttgtaaagagttgttttttatattgggattgtgtgtgtttttgagtggaaagtgtgtttttggagttatggttttgttaatttttaattttattttttgggtagggaaagtaggattgttgttgttgatgttttggattattatttttatgttgaatagttttagtgggttttttattattaattttagagttatagtgtaagagggtagtgttttatatagttttttttgatttagatggttgtttataaatatttttttggttttttggtttattttaaagaatttttggttagttttagatattatttggaatttgtgggttgagaggttattgagatttaaattaaggtttgtgattatgttgtttatagtgaaattttttttttttttttttgggattttatagtgaatgattgtggaagttttgtttaaggtattaagtagaagtaaaatttttattatttttttggtgtttattagtttgtttttttaggtttttgggattattttatttaaaagtagttttttttagtggggtttagattgtttttgagattttgttgagaaatttttagtgggttagtgtttgggtgttgggtgttgagtttgatatggttttttggatgttgttgatttgtttgttggttgtttagtttttgttttattttggggtgtagaaaggggatgggtaggggtttgatttttagtgtttttatt

SEQ ID NO: 47 - DNA, 2236 bp, Artificial Sequence
  chemically treated genomic DNA (Homo sapiens)
taggtgttaatgattgtgttagattggtgttggaatttttgggttataaggttttagtgggtggtgttattatttttgtggtttgtaaaagtggagtggttttgttaggtgggaagttttttttttttttttagatttgtgataggttgtaggtaagaattagtgtaattagggtgtgtttgtatagatttggaggtggttgtatgttgttatttgttttagaaggtgtttggtggttgttttgtagttttagagtttagagataagtagaggaaggaagataggatatttgggttagttgtttgagttaagttgttgtaaatgttaatattgtttgtagtttttttgttagtatttatgtttaaaagtaatttaagtttgtgtgttagtgggaaatttggtgtttatgatttgttagtgtgggttgaaatttttttttgatgtttttttagttgtttttttttttttgtgtggttaggaggggtaaataatatgtagtggggtggggtgttttggaaggggtgtgttagggagggaatgatgggggttttaggtaaagttttgaatttttttatgtaatgggaggaatatagatatgttttagttaagtgtgtgtgggaattgtggaattaaggtatttagaggttaagggtttgtgttaagttttgtattttgttttgtaggggaatttttatattttgtgattgaatttgaaagattttttttggtggatgaaagttgttattttttggttggttgagttatagtttttgtagtgtgtttaggagtgtgttggagatttggaaatttgtagagattttttaagttagtaggaatttggaaattgttgttttttttaaatggttttaaatatttgtgtttttttttttatttaatttaattttaatttgttttttttataggtttaatttttatttttttaaaattttaaattagtaagttaaattgaagttttagaataaggtttaattaatgattttaatttaatattaagtttgaatgtttattttttggatttgataaattagatgtagagtgatgaatggagattatttttttgggaggtggaatttagttgggttttagtttgttttgggagaggagtatgttttttttgagttgtaggtgggtttggttttgatgaaatgttgtgagaatgttagatagtgtagtttttattgtttgtttggggtttttgttgttattagataagtatttttatttatttatttttttttattaattattgttagattttttttgtgttttttgattttgttgtaatttttttttttgggtgatgtttggatagtattagtagtagttgtttgagggaggggggtagtttttgtttggggataggttttaaaaggttgtttatttgttagagttttatgttttttaaatgaatttaaattaagggtaagttattatgtattatgtgatatttggtagttttagattagaataaggttttgtattgaatgtgataattgaatttttaatgttaagtgttattttttttttaggtaaatgttttgttgttgtgatatttaaggttggtttgtgggtgttgttttttgttttgttttattttgttttgaagttttattttaagttaatattaattttaatatggaatagtttgattttttttttttaggtttttttattgttttgagagaggattataagtattttttattttttttagtatagttttttttttttttttttgttatagtattggtgttaggtaattttaggtatttttatattgtatttatgatagatttgatgtttattggagatatgaaaataattagaaagttgttatgtaaatttaatatgatatttatttattaggtagagtaatataataaggtttttttatttatttttgagttttatgtttattgtagagaggaaaataatagtgattggtagttttgtttagagattgtataaaagaggttaggaagttaggtttggagatgtattggagagtattgtgttgttttttaattagtaaaatttttattggatttgtggaattttaaatttagaagtatttattttatgtagtagttttatttagagataggaggtttgttttttgttttatgttagttaatggaatagatgggataagaattttggatttttggtttttaggtaatgttttttgggatagtggaagtagaaaattaatttt

SEQ ID NO: 48 - DNA, 2236 bp, Artificial Sequence
  chemically treated genomic DNA (Homo sapiens)
gaaattgattttttatttttattgttttagaaagtattgtttaagagttaaaaatttaaggtttttgttttatttattttattaattaatatgaagtaaaaaatgagttttttgtttttgggtgaaattgttatatggaatgggtgtttttgggtttgaagttttatagatttagtagggattttgttgattggaggatggtatagtattttttagtgtatttttaagtttgattttttgattttttttatataatttttgggtaaaattattagttgttgttatttttttttttgtggtaaatatggagtttaagaatggatagaaagattttattgtattgttttatttggtaaataaatattatgttgaatttgtatggtagttttttgattatttttatgtttttgataagtattaagtttgttataggtatagtataaaaatgtttgagattgtttaatattgatattgtggtaggaagagaggagaagagttgtattggggaaaatgaggagtatttgtaatttttttttggggtagtgagagggtttgggaagaaaagattgagttgttttgtgttggggttaatgttggtttgaaatgaaattttagggtaaaatgaagtagagtaaagagtagtgtttataaattaattttaaatattatagtggtggaatatttatttgaaagaaaagtgatatttggtattaaaagtttaattattatgtttagtgtagagttttgttttagtttggagttgttgggtgttatatggtgtgtgataatttgtttttgatttgggtttatttgaagagtgtagaattttaataaataaatagttttttgggatttgtttttggatgaggattgttttttttttttgggtaattattattgatgttgtttaggtattgtttaaggggaaaggttgtagtggggttggaaggtgtgggaggagtttggtggtgattgatgggaagggatgaatgaataaaagtatttgtttgatggtagtagagattttgagtaaatggtggaggttatattgtttggtatttttgtagtgttttgttagagttggatttgtttgtagtttaagggaggtgtgttttttttttagagtaggttggaatttagttgggttttgttttttgggaaggtggtttttatttgttgttttgtatttggtttgttagatttgagaggtaaatatttgggtttggtgttgaattaaaattattgattgaattttattttggggttttggtttggtttattagtttgggattttaaaaaaataaaaattaagtttatagagagggtaaattaaaattaggttgggtaaaggaaggagtgtgagtgtttgaagttgtttggagggaatagtggtttttaagtttttgttgatttgagaagtttttgtgggtttttgaatttttggtgtatttttgggtgtgttgtgggagttgtagtttagttagttagggagtagtggtttttatttgttgggaggagttttttgagtttaattgtggggtatagaggtttttttgtggggtaaaatgtagagtttgatataagtttttggtttttaggtgttttaattttgtggtttttatgtatgtttaattaagatgtgtttgtattttttttgttatgtgaaagagtttggagttttgtttgggatttttattattttttttttggtatattttttttagaatgttttgttttattgtatattatttattttttttggttatgtgggggaagaaaaatagttgagagggtattaggaaggagttttgatttgtgttggtgagttatgagtgttaagttttttattggtgtgtaaatttgagttatttttgagtgtggatattggtgaagaggttgtgggtggtattagtgtttgtagtgatttggtttgggtagttgatttaagtgttttgtttttttttttttgtttgtttttaggttttgaaattgtggagtggttattggatgttttttggagtaggtagtagtatgtagttgtttttaagtttgtgtggatgtgttttggttgtgttggtttttgtttgtggtttgttgtggatttggggagaggagagaggttttttgtttgatagggttattttgtttttgtaaattgtagagataatgatgttatttattaagattttatggtttaagggttttaatgttagtttggtgtggttgttggtatttg

SEQ ID NO: 49 - DNA, 2204 bp, Artificial Sequence
  chemically treated genomic DNA (Homo sapiens)
tttttttgtaaattggtttaagttttgggaggtgggattgggggaggagggggtttattttggggttaggttagggttgggtggaggaggtggtttttgagagagtgagttgggaaagaaggggagtgggtaaagggtgagatgtggggttttggtttttgttttgttggttgttagttttttttgtgttttttagtttgtgtgtgtgatatgagatagtgtagttttggtatggggtttggtatttggtggttgtgagataattagggtttgtgtgatgggaaatgtgttgttggtagtttgttatttttttattgtgattttagtttgttaaatagggtttgtgatgtttagtttattagggaggagttgtggttttgagattttgtttagtttgaagtagtggagattggttaggagtttggttgttagattttggagtgtatgttgtgggtgggggtttggtttatgggggagggttaggggatgtgggatttatttttgaaggagttggggagttgttgggttttggagttttgtgtgtgttgttttttggttatgttgtttgagatgtagttgtatttttttgtttttgttgttaaatttggagttgttgggaatgttttgaggagttagaggtataagatttagattgttgttttgtttttaattgaggttttgtttttgtgagagttggttaattaatgtttaggattgaggaggatttattttttaatttttgtttttttgtttttttatggtgtgattgttttgtagttattttttgttagttttgtgggttgaggggtgtggtttgaggggtgtggtttgaggggtgagagtttttaaggttgtgggtatgaggttggggttttgtattggaagggagggtggaagttatgggatgtggagtagatggtgaggatagtggggaggtagtagtagaggatgatttgaggtaaaagtgtaagtgaagaaaagttgttttgttgggtagaggtatgggattaaggtgttttttttgggttgaggagttagagggaagaaaatggtgttttgttatgagggtgtgaggtttgagttgaggggagaagattgagggatatagaagtggttgaagtgagggtgttgaggttagtttgagttgagagggttggtagattatgttgtagttgaagtgaatgaatttgagtgaggtgtgttaagaaaattaaaatgtataaatttggaaaaggagaggaggttgggtgtggtggtttatgtttgtaattttagtatgttggaaggttgaggtgggtagattatttgaggttagaagtttgagattagtttggttaatatggtgaaattttgtttttgttaaaaatataaaaattagttgggtgtgtggtgtgtgtttgtaattttagttatttgggaggttgaggtaggagaattgtttgaatttgggaggtagaggttgtagtgagttgagatggtttgggtgatagagtgagattttgttttaaaaaaataaaataaaaaataaaaaaataggagaggagattttattttttgtaaggggttatagtttgtaaggtggttattttgtaggttggagaatggttaggattagagataggtattttgttggaggaggggttggagtagtggttttatgttgaatagtttgggtagatatgtatatttagtaggtgataggaggagttatgaatatttatgagggtggttttgatgtatgtttattgagtaaatatgtatgtaatatataatttatgtttattttggagtgaagagttattaattaaatgttaaatgtttggtttgtatggtgatgtttttatttttataaaaagtaaaaaaaaaatagttaggtggggtggtgtgtgtttgtggttttaattagttaggaggttggggtaggaggattatttgagtttaagagttggaggttgtagtgatgtatgattagattattgtattttagtttgatggattttaaaaaataataataatatatgtattatagttagattttatgtgttaaaaggtttttttaggataggaaggtgtgtaagtatgtagtttgtgtaaattagttagagttagtttatggttggtagtttttttatgaggagaaagttattgaaattagttttttgtttaattaaagttgtaatgatggttggtggaataggggtttt

SEQ ID NO: 50 - DNA, 2204 bp, Artificial Sequence
  chemically treated genomic DNA (Homo sapiens)
ggaatttttattttattagttattattatagttttaattggataagaggttgattttagtaattttttttttataggaaaattattgattatggattggttttggttagtttatatagattgtatatttgtatatttttttgttttgaaaagattttttgatgtatggggtttaattgtaatatatgtattgttattattttttagagtttattaggttggagtgtagtgatttgattatatattattgtagtttttaatttttgggtttaagtgatttttttgttttagttttttgattagttgggattgtaagtatatattattttatttggttattttttttttattttttgtagagatggggatgttattatgtaggttaggtatttaatatttaattggtaattttttattttaaaatgaatatgggttgtatgttatatgtatgtttgtttaatgggtatgtgttaggattatttttatgaatatttatagttttttttgttatttgttgaatatgtatgtttatttaagttgtttagtataaagttgttattttaattttttttttaatgaaatgtttgtttttggttttggttattttttagtttgtggaatggttattttgtaggttgtaattttttataagaaataaagtttttttttttgtttttttgttttttgttttgtttttttgagatggagttttgttttgttatttaggttattttggtttattgtaatttttgttttttaagtttaagtgatttttttgttttagttttttaagtagttgggattataggtgtgtgttatatgtttggttaatttttgtatttttagtagagatggggttttattatgttggttaagttggttttgaatttttaattttagatgatttatttgttttggttttttaatgtgttgggattataggtgtgagttattgtgtttggttttttttttttttttaaatttatatattttgatttttttaatatattttatttgagtttgtttattttggttgtggtgtgatttgttggtttttttagtttaggttgattttagtgtttttattttggttatttttgtgttttttagttttttttttttaatttggattttgtgtttttatgatagggtgttatttttttttttttaattttttagtttagaggaggtgttttggttttgtatttttgtttggtaaggtgatttttttttatttgtatttttgttttgggttattttttgttgttatttttttattatttttattatttgttttatgttttgtggtttttgtttttttttttggtgtagggttttggttttatatttatagttttgggggtttttgttttttaggttatgttttttaggttatgttttttagtttatagaattagtgggaagtgattgtgaagtagttgtgttgtggagggataggagggtggggattgggaggtgggttttttttgattttgggtgttgattggttaatttttatgagggtgggattttgattgggggtggggtggtaatttgggttttgtgtttttggttttttagggtatttttggtggttttgggtttggtaatgaggatgggggagtgtgattgtgttttgggtagtatggttgagaagtggtatatatgggattttgaagtttagtggttttttgatttttttaagggtgagttttgtgttttttgatttttttttgtggattgagtttttgtttgtagtgtgtgttttgaggtttgatagttgggtttttggttagtttttgttgttttgggttgggtgagattttaaagttgtggtttttttttagtaaattgagtattatgaattttgtttggtagattgaggttatgatggaggggtggtgggttgttaatggtatgttttttattgtatgggttttggttattttgtggttgttagatgttaagttttatgttagggttgtattattttgtgttatgtatgtggattaggaaatgtagagggaattggtagttagtgaggtggggattgggattttatattttattttttgtttatttttttttttttttgatttatttttttgaaggttgttttttttatttagttttggtttggttttagggtgaattttttttttttttaattttattttttgaaatttagattgatttgtagaagga

SEQ ID NO: 51 - DNA, 2137 bp, Artificial Sequence
  chemically treated genomic DNA (Homo sapiens)
ttttattagttagtatttaattatttaaaagtgtggtttatgtttggaattgggttataaagatggtaatgtgttaaattagatatttgttttttgtatatttttataaattatattagtttattttataattttgtttttgttagttataaagaagaaagtttaatattttagatgtttatattttattaaattgtgggtgaagagttagtgagtggtaaaaggtggttgttttgagttgtggtgatggaatttttagggaatagttaggagtttggaaagttatttttgagttggtttatttaagtatttgggatagaagtggttagtagaaattttttatggaattttaaaatattattaggatagtagttttatgatatttttaaaatttggagtttaaaaaataatgaagtataatttatttagaatttaagtattaagggaaaatgttaagttttgttttattttaaagatttttttttgaggaaaatatgttattgttttttagatgtgaatgaaatgatatttttttttttgatatagtttttttgtttatgattttatattgtttttttttaattttttttattattgaaatattatatgtaagatttgttggtatgttttttgattttttatgtttaaggggaaaaatgtttgtagttgatgtttgagttttaggagtttggtgaagaaaaaaaaaaaaagtaatgtaaggaaaattgttttaatggtatattttttttaaagtttgaagttttataggtaaaaggagggataaatatttttttttgaaagtaaatagttaaggtttttttttatttaattatttttgaattttttgtaatttttttgaggtttaaatttagggtataattaattttagattttattttaaatttaatttgttttttatttgtaatttgtttgtaggtgggttttttttttttaaattataaatttgaatttgtgttaattttttataatataaggtatttaaagttttttggagttattgatttggtgatgttgtagtgtatgtttgtatttgaaagtaagtaagagaatagaaagtgagtaagagaattgtaatttttattattttggtgaatttttgttgggatttatatattaaatagtatttgtatatagatgttttaagttgttttttttagagttgttatttagatttgtaaggggtgggggattagtggaaatttaaatagaaatttttattattataaaggtgagtttttattgattatggtaattgttttgtttaggttgtatgggtatggttaattttgtttgaaagtttgttttttttttgtgtttttttgttgagttttttttaggttttggttttttttgatggtggtaagggatgttttttatgttttttattatttttgtttgtgtttgtgttttttgtttgaggttttaggttgtggtggtggtgtggtgggtttattagtgggtgtgttgggtttgtgtagtgttgtttgtagttgtgttgttgtatttattattattatattagtgtggggaagtttatgttgagtttttttggttttggtgtgttttagttagtgtgttagtaaatagaatatgttggattgtttagagatggttttgggtgtttgggggtagaaggggtgtttttaggtttggttttgatttgtatttttgaagttggttttgggagataatgtatttttgttagttaggttgtgggaaaagtgaaaaaagggttgggggttatgtgggggtggggaggtgagttttagtgttagtagtgtttggtagtttttttttagtgtagagaagtggtttgtattaaggtgtattagagtggttattttgttttttggaatatttatgggtatttgtaaattttatagttggtttagttaaatttttagtaaatattggtaagggttggttttggttgtgtttagagggtttttttaattggttgaatttagggagttgtaattttttaggtattttgtaatgtaattattttgagtgttgtattataataaaatattggggattttttgaaaagtttttataaaattaataggtgtgtgttttgtttataaaatgttgaatttattttttatgaatttgg

SEQ ID NO: 52 - DNA, 2137 bp, Artificial Sequence
  chemically treated genomic DNA (Homo sapiens)
ttaggtttatagaaggtgaatttgatgttttgtgagtgaagtatatatttattggttttgtgaaggttttttaagggatttttaatgttttattataatgtgatatttagggtggttgtattgtaaagtatttggaaggttgtagttttttgaatttagttagttaaaagagttttttgaatgtaattagggttggtttttgttagtgtttgttggaaatttggttgggttaattgtagagtttgtaaatgtttgtgaatattttgaggagtagggtgattattttgatatgttttgatatagattgtttttttgtattggagggagattgttaggtgttgttggtgttggagtttatttttttatttttatatggtttttagttttttttttattttttttgtggtttggttggtggagatgtattgttttttaaagttagttttagaaatgtggattaaagttgggtttgggagtattttttttgtttttagatatttagagttgtttttgagtaatttagtatgttttgtttgttggtgtgttgattggggtgtgttggggttgggagaatttggtgtggatttttttgtgttgatgtaatgatgatggatgtggtgatgtggttgtagatagtgttgtgtgggtttggtgtgtttgttaatgaatttattgtgttgttgttgtggtttgggattttgggtaggggatgtaggtgtgggtaaaagtggtgaaaggtgtgaaaaatattttttgttattgttggaggaaattagaatttgaagggaatttgataggaaagtgtagagaaagagtgagtttttaaataaaattggttatatttgtataatttgagtaaaataattattataattaatggggatttgtttttgtaatggtgaaagtttttgtttgggtttttattggttttttgttttttgtaggtttaagtgatgattttaaagaggatgatttgaggtgtttgtgtgtaagtgttgtttaatatgtaggttttggtaagaatttgttaaggtggtaaaggttgtggtttttttgtttgttttttgtttttttgtttatttttaaatgtagatgtgtattatagtgttattaggttagtggttttaggaagttttaaatgttttgtgttgtaagaggttgatgtaggtttagatttataatttagaaagaaaagatttatttgtaggtaggttgtaaataggagatggattagatttaaaatagggtttggaattaattgtgttttgggtttaggttttggggaaattataaaaggtttagggatagttgagtgggaaaaagttttgattgtttgtttttaggaaggaatgtttatttttttttttatttatgaaattttaagttttaggaaggatatattattagagtaattttttttgtgttgttttttttttttttttttattgagtttttgggatttaaatattagttataaatatttttttttttaagtatgaaaagttaaggggtatgttagtaaattttgtatgtaatgttttagtggtgaaagggattgaaggagaatagtgtggagttgtaagtaaggaaattatgttgggggaaaaagtattattttatttatatttgaaaaatagtggtatgttttttttagggaaaagtttttgaagtgaagtagaatttaatgtttttttttgatgtttaagttttaaataaattatattttattattttttaaattttaggttttaaaagtgttgtggagttattgttttagtggtgttttgagattttatgaggaatttttattgattatttttattttgaatgtttgaatggattagtttaggagtgattttttaagtttttgattattttttgaaaattttattattataatttaaagtggttattttttgttgtttattgattttttatttatagtttgatgaggtgtgggtgtttagaatgttaaatttttttttttataattgatagggataaagttgtaaaataagttgatataatttataggagtgtataggaagtagatgtttgatttggtatattgttatttttatagtttagttttaagtataaattatatttttaaataattaggtattaattaatgaga

SEQ ID NO: 53 - DNA, 2461 bp, Artificial Sequence
  chemically treated genomic DNA (Homo sapiens)
ttttttttttttttttttttttttttttttttttttttttttttttttttttttttttttttttttttttttttttttttttttgtttttttttttttttttttttttgttttttatttttttagtttgaaggttgtattttttttatttttttaagtaaagttgggagttttgtagtattttaggagtgaggataattatgtttaagaaattttggttttagtttagttttagattaagaggaaaatattttaaaattttaaagtaaattttaaaagtgtaatttatattagagtgattgatttggtatttatgtagattgaagtttgagaagtaatttaagtggtttttatttatttttttggaagagtttttagaatgtatttttattggtttgaaaaatgtttgaaaaagagttttgatgttaatagtaatggaaataggagggttggtggtttatgattagtttagtggtattttttattttatttgtatttaggtaaagagattgtggtttgtatgtgattaaataatttgttgaagtgttttgggtttagggtatttaatttttgtgaagtaggattattagttgtttgttttgtttttgtgttattttttagaatatattaaagtaggggtaatttttgagtttagatttttgttatgtgaagattttttgaaaattttgataaatataggtattgtgtaagtggttagttaattaaagaggggaggtggagttgttttttgtgtatttaataagtatttattattttatttgagtatgaaaagaggttattgttattatttttaagaaggaaagtaagtaggatagtttatatttttagaataattttttattaaatggaataattttggtgaaaagtgggagtgaggaagaaagaaaaaaaaaatttttaattataatgtttgggaataagaaaggaagaagaaatttatgttaaagttgatttttttttgtagttgtaaaataaatttttaagattttttttgttgaaattttggagaggaaaattggagtggtgggtgggttttgtttgtagtttaatttttttttgtggtgtgggtgtggttgggtttagtattttggaaagtgttttttgtggtgttttgggattatgtatgttttttggggtttgttgttttggttgtgtaagtgttattgtaattggtgagagttgttggtaatttatttggagttgataattgtggagagatgtagatatttattgatttttaggaagttgagtgtggtggatggaattttatgatttttttttttttaaggatggaaattttatttaagtagttttagaggaaatggataaaggtatttgaaagggagtgagtggttttaaattgtataattgagtggttgggggagttatgtgttagtgttttagtgattgtgggatatggagaggggaagtttgtgttgtatataaggatttagggattttgagtttggtttgagaatttttggatgttgagtgtttgttttatgggttgtattttttaattttgttttaaagtagttgttgagtttaatttttgtgtttagggtgtttgttgtgtgttaggatgtgtttagtatttagtttttgggttttttttttagtagttgttttgaaagtttttatgtatgttttgtaggttagtttggtaataaaattggggtaaattgtgttattttaggttttgttttttagaatatgatttagaggtatttgtgtatgtagatggttgatgtagttatgatagttattatgaataaggtagtaggtggggataagttagtagaattttttagtttggttttggattttttggaggtggttaatatgagtggtaatgtgttgttgtagtttttggatttgtggtgggagttggggttggagttgttggatggtgtgttgttaggatattttttgggtagtggtggggtagagagtgtggatatagaggtttgggtgtggatttttattagtgtggtgtattgggtggtgtgtgttttggggttggtgggtaatttgttggttttttatttgatgaagagtatgtagggttggtgtaagttttttattaatttttttgttattaatttggtgttgatggatttttagtttgtgtttattttgtttttttgggtggtggagaatgtttttgattttaaatggttttttggtaaggttatgtgtaagattgtgtttatggtgatgtttatgaatatgtatgttagtgtgtttttttttattgttatgagtgtgatgtgttattatttggtggttttggttttgaagagttattggatttgaggatatggttggggtgattgttgtggttggagtttgggggatagttgttgttttttggttaaggtgttgtgtgtgtggatttgggttttggttgtgttggttttgttgtttagtgttattttttt

SEQ ID NO: 54 - DNA, 2461 bp, Artificial Sequence
  chemically treated genomic DNA (Homo sapiens)
gagaaaatggtattgggtagtgaggttagtgtggttaaagtttagatttatatatatagtgttttggttgagaagtagtagttgttttttaggttttggttgtagtagttgttttggttgtgtttttgggtttggtggttttttagagttgaggttattgaatggtagtgtgttatatttatggtagtgaggaagaatatgttggtgtatatgtttatggatgttattatggatatgattttatatatggttttgttgaagggttatttgaagttaagagtgttttttattgtttagaagggtagggtgagtataaattgaaagtttgttagtgttaggttggtgatgaagaggttgatagaggatttgtgttagttttgtatgttttttattaggtagagaattagtaggttgtttgttaattttagggtgtatattatttagtatattatgttgatgagaatttgtatttgggtttttgtgtttgtgttttttgttttgttgttgtttgggggatgttttggtggtgtgttgtttggtaattttagttttagtttttattataagtttggaagttgtagtgatgtgttattatttgtgttggttgtttttagaaggtttgggattagattgaagagttttgttagtttgtttttgtttgttgttttatttatggtggttattgtggttgtattggttatttgtatgtgtaggtatttttaggttatgttttgggggataagatttaagataatatggtttattttagttttgttgttaggttagtttgtgggatgtgtgtgggagtttttaaagtagttattgaagagagagtttaggaattgggtattaagtgtgttttggtgtgtagtgaatgttttggatgtaggagttgagtttagtggttgttttggagtagagttgaggagtgtagtttgtaaggtaagtatttggtgtttaagggtttttaggttaagtttggagtttttaggtttttatgtataatgtagattttttttttttgtgttttgtggttattggggtattggtgtataatttttttagttgtttaattgtgtgatttggggttgtttgtttttttttaaatatttttatttgttttttttgggattgtttggatgaggtttttgtttttggagagaaagagattgtagagttttatttattatgtttagttttttggaggttagtgggtgtttgtgtttttttgtggttgttaattttgggtgggttgttagtggtttttattagttatggtggtatttgtatggttaaggtggtgggttttaaggagtatgtgtaattttggggtgttgtgaggggtgttttttgaggtgttgaatttagttgtgtttgtgttgtgagggagagttgagttgtaggtaaagtttatttgttattttagtttttttttttagagttttagtaggaagggttttaagagtttattttatagttgtaggagaaagttggttttgatgtgagtttttttttttttttttatttttaaatattatgattagaagtttttttttttttttttttttatttttattttttattggaattattttatttggtgaggaattgttttaaaaatatgagttattttgtttatttttttttttgaaagtaataatagtggtttttttttatgtttaaatgagataatgggtatttattggatatataaaggatagttttattttttttttttaattagttgattatttatgtagtatttgtgtttgttaggatttttaaagggtttttatatggtagaagtttgggtttaagggttgtttttattttaatgtattttgagaggtgatataaaaatagagtaaataattgatggttttattttatagaaattaaatgttttaagtttaaagtgttttaataaattgtttgattatatataggttatagtttttttatttagatgtaaatagaatagaggatattattgggttgattgtgaattattagtttttttatttttattattgttagtattaggatttttttttaggtgttttttagattaatggaagtatattttaaggatttttttaagggaatgagtggaaattatttgaattattttttaagttttagtttatataaatgttaggttaattgttttggtgtaaattatatttttaggatttattttaaaattttgaaatgttttttttttggtttgggattaaattgaaattaaagttttttaagtataattgtttttatttttggagtattatagaatttttagttttatttaaggagataaagaggatgtaatttttaagttgaggagataagaaatagaaaaagaaagaaagagaaaaatgaaaaagaaagaaagaaagaaagaaagaaagaaagaaagaaagaaagaaaagaaaagaaagagaaaaaggaaaaaagaaaaaaa

SEQ ID NO: 55 - DNA, 1920 bp, Artificial Sequence
  chemically treated genomic DNA (Homo sapiens)
ttaggttgttgtagatatagtttttgtttttttgaaaaatatgttttaggtgttgggattttagatatttgggaaatagagtgtatgtagttgttgagaggttttgtgtttggttttttttattattgaggtgtagaggtgttgtggatagtttagatttatatggtgtttgaggtgaaatagaatttttagtttttttatgaggttattggtatttttggttgtttttagagttttttgatttagagttgaatgtaaagtaagtgtttgaaatgtagaagtagttggggttgtttatggtatttgttttgtttggggtgagagaagatgttaggttgaggttttagtgattttaggtattagttttgaaggagggtggggagattgtaaaggggaagtgtttggagggttaatggtttttgtgtattttgtgtttttttgaagtgtgttgtttttttgtgttggggattgggatttgtttttggggaatttgtttagaagatggtggtggattggggttgggtattttttagggttgttaggttttttttagttttgtatttgttgtgttgttttattttgttaggaagttttagagattttggggatggggtgggagtgtttttttattgtgggtttaaaaagaaggaaggatgtttttaggggttgtagaaggaggattagttttaagttataattttttttggatttaaggtaggttggttggggttttgtgtttatatggtttttggtgggggtttgtgtgttttgggagttttgtggtttggggaggaaagaggagataagagataggtgaggattatggggttgatttagttggggtagggattattgtggaaaaattttggtgaggtggggggatgtggaaagagagtggtttgtgttttgtattttgtgttgggtattttgtgttagtgttttgtttttagtgttttgtgttttgtgttttgtgttttgtttttattttgggttagttgtattgtgtttgtgttgtaggaattgtggagttggaaagtgggggtgttgtggttggggggttgttttagttgtgttttggttagtgattggtgggttgggtttaaatttagttaggttgggtaggtggtggttgtgtgattggggattgggtgttttgttttttttgtttttttttttttttttttttttttttttagttttttggttttttttagtttttattggatttgtttgtttgttgttttttttttttttttgttttttatattattttttatttttttgttttgtttttgtttttttttttttttttgttttttgttttttttttttttttttttttttttaggggtggagtttttttttttttttttagataatgttgtggttgtgtttttttttttgttagtttgtttaggtttttgttgttagtgatttttttgggttgggggtggggaggtggggggggagtgtagggttggggaggatgagttggttttttttatttttttgttgttgttttttttaagagggatggagatttggtttaagttttttggtttatttggagttgtgatagttatttttagggaatagttatgttgttttattaagtttatttttagtggtttggattttttaggtagaggttgtgggattttgttttttttaatattttagtttatttttaaaagggtttgagttggataggggttaaataggtttttttgatttggtgggttggttagatgtgatagtaatgttaaggaggttaagtttttttgtttattttttattttttttttttttatttttggattttttggtgtttttagtatatagaggtttttgagtagtttggttgtaggttttttatttatttagagtttttttttttatgtgtttatttttaattttgta

SEQ ID NO: 56 - DNA, 1920 bp, Artificial Sequence
  chemically treated genomic DNA (Homo sapiens)
tgtagggttggggataggtatgtgagggggagaattttgagtagatagggaatttgtagttgggttgtttaagggtttttgtgtattgggggtgttaggaggtttagggatggaaaagggggaggtgagaaatggataaagaaatttggtttttttggtattgttgttatgtttggttggtttgttaagttgaaggggtttgtttagtttttgtttggtttaaatttttttgggaataagttgggatgttagaaaaaataaaattttataatttttgtttggggaatttaggttgttggaggtgggtttggtagggtagtgtgattgttttttgggagtggttgttatagttttgggtgaattgaggagtttgggttaagtttttattttttttggagagggtagtagtaaggaggtgaggggagttagtttattttttttaattttgtattttttttttatttttttatttttagtttggaagaattgttggtggtgggagtttggatgagttggtggggaaggggatgtagttatagtattgtttgggagggaggggagaagttttgtttttagaggggaggggagaagaggagggggtaggagataaggggaggaagaaaggtgaaggtaaggtgaaggggtggagagtgatatgaagagtgagagaaaagagaggatagtggatgagtagatttggtaggggttgaaaaaggttaaggggttggagggagggagaggaaggaggaggggagtgaggagggtggggtgtttggtttttagttgtgtggttattgtttgtttagtttggttggatttgagtttggtttgttgattgttggttgaggtgtagttgaagtagttttttagttgtggtgtttttattttttaattttatggtttttgtggtgtgggtgtgatgtagttggtttggggtgaaggtaaggtgtggggtgtggggtgtggggtattgggagtgaggtattggtgtgggatgtttggtgtaaggtgtagggtgtgggttgttttttttttgtgtttttttattttgttaaagtttttttatgatggtttttattttggttgggttagttttgtaatttttgtttgttttttgtttttttttttttttttgagttgtggggtttttggggtgtgtggatttttgttaggggttgtgtaggtgtggagttttagttggtttgttttgggtttgaagaaagttgtggtttggagttagttttttttttatgatttttgggggtgtttttttttttttttgagtttgtgatgggaaggtgtttttattttatttttggggtttttgagattttttggtgaggtggggtggtgtggtaggtgtagggttggggagggtttgatagttttggagagtgtttgattttagtttgttgttgttttttaggtggattttttagaggtaggttttagtttttggtgtggggaggtggtgtgttttagaggggtgtagggtgtgtgggggttgttggttttttgggtattttttttttgtggtttttttgtttttttttggagttggtgtttgaggttgttgggattttagtttggtgtttttttttgttttgagtgaggtaggtgttgtgggtggttttggttatttttgtattttgagtgtttattttgtatttagttttaagttggagagttttggggatagttgagagtgttagtggttttatagggagattgagggttttgttttattttgggtgttgtgtgggtttgggttgtttatagtatttttgtgttttagtgataggagaagttaagtgtgaggttttttaatagttgtgtgtattttattttttaggtatttggaattttggtgtttagaatgtgttttttgggagagtaaaggttgtgtttatggtagtttgg

SEQ ID NO: 57 - DNA, 2225 bp, Artificial Sequence
  chemically treated genomic DNA (Homo sapiens)
atttttttgtaaattaaatttttgttgtttagtttagtgtttggtgtatagtgggggttagatagatatttgttgagtgtatgattagggtgttgtaggtggaggaggtggtggtggggtgggggaggggaatttttttgttgttttttgttttgtgggaattagttttagaaagaaattttttgttgttttttttattttattttaattttggatttgttttttgattttttttatttggttttagttttttatttagagttaattttgtttgaaaggtattatgttttgttattaaggttttaaaatagggaaaatagtttttgaagtttttagtttgtaggagatagggtattttagggtataaggttttattgaggggttggaaaaagagtttagattttaatatttatagaaaggggttttggttgtttagttgtgagtggttttttttttgttttttagtatatttggaaatgattttatatgtgggtgttgtgggatgttgggtagtaaggagatgatttagttgaataatgtatttggtttatttttgtgaggggaggagaatgttgagggataggaattgtgtgttagtaaaagatattttaatttggggtgtgtttgttagttgtttttttaaggtgaaaatttttaagaggtgagatgtaaattttagtggtgtttatatttggaggtgttttttttttaggttgtttttttgttttatgtgatattttaatttttgtagtttttgtttagtgtgggattaagaatggggagttttatttttttttggttttttagttttttaatttaagataagagggtgtgtgtttgggttgggataggttttagttgtatttttgtagattgtattttttgtttgggagtgatttgttttagtagttttttttttgttttattaatgtggttgtattgttggtgtttagaggtgatattttggtaaagataggaattaagttagaaatttaggttttagaagtaaaggttgtggtgttttttggttggaagaaaatggtgggtgggtggaggatgtggtgtgtgggaatttttttatggatgtttgttgttttttgtttattttttaggaaggtgtttttttatttgtatttttttttgtaatttggagtttgtttgtgagtttagttatttgttggttttttttgtttgtgtttgtatattatagattttgtttattgtattttatttggttttagagggtttagaggggattttttgaaattaatttgtttgtttggagttagttttgatgtatattttgagagtggtgggaggtaaagtagttggaatgtttgagaaaaaagtgggtgttagaggtttttgttttagtgatttttttattgtattgattgagttttgggattgtagggatttaagtttttatttgttttggtgttttttttttgtgtgttttgttgttttggaagttggattgagagttatagtgtggttgggtgtaggtgggttgtttggtttttattttgaggatttggatttgtatttgtagagttgttgtgtgggggatgttttttttttttttttgttttggtgggtttttttggtgtgttagggtttttgggttttagttggagttggtgttttggttttatagttttttttagtgttttggatttgtgtgttttgttttgtgttggattttgttttggggtttttgtttgttttttagtttaggttaagggtggatgtttagtttttttattttattgtgtgtttttgggttggtgtgtttagggtgtgggtattgtagttttggttgtgttgatgtgagtttttggtagtgggggtagttttttgtatggattttagtgtttttgtattttgtttgaattggattatatagtagttgggtttttattgtgtgtttgggaatagtgagtattgttttttgttgttagttgtggtattgtatttgggttgtgtgtgtaggaggggagagttttgttttttggaggtgtttagtgttagtgtttgtgtttattagaaggtgatttttttaaggaaagtttggttttgatgagtgtggtgtgggtttttggagatggtggtgaaggaggaggtttttaggaggaagttggggatggggatagtttgttttgtttaaagtttttgaagtttttatttaaattttgtgatgattattattattagattttatggtt

SEQ ID NO: 58 - DNA, 2225 bp, Artificial Sequence
  chemically treated genomic DNA (Homo sapiens)
ggttatggaatttgatagtggtggttattgtaaagtttgggtgaggattttaggggttttgagtagagtaaattgtttttatttttagtttttttttgggggtttttttttttattgttatttttaaaggtttatattgtatttgttggagttgggttttttttgaaagggttattttttagtgggtgtggatgttggtattgggtatttttggaagataggattttttttttttgtgtgtgtgatttgggtgtggtgttatgattggtggtagagggtggtgtttattgtttttaagtgtatggtagaaatttggttattgtgtggtttgatttagatgggatgtgaaggtgttgaaatttgtgtgagaggttgtttttgttgttggggatttgtgttagtgtggttggagttatggtgtttgtgttttggatgtattagtttgagagtatgtggtggggtgggggagttgggtatttatttttggtttggattaggaggtaggtggggattttggggtggagtttagtgtggggtggggtgtataggtttgagatgttggaaagagttgtggggttggagtgttaattttagttggaatttagagattttgatatgttggaggagtttgttggggtgaggaaaaaagagggatattttttatgtagtggttttgtaagtgtaagtttgggtttttgaggtgaaaattgagtggtttgtttgtgtttaattatattgtgatttttgatttggtttttggagtagtagagtgtatagaaaggaggtgttgagataggtaagggtttagatttttgtagttttgggatttagttggtgtggtgggggagttgttaggataagggtttttgatgtttattttttttttgggtattttggttgttttgttttttgttatttttgagatatgtgttggggttggttttaagtaggtgagttggttttaggagattttttttgggttttttaggattgggtagggtatggtaagtggagtttgtggtgtgtgggtgtgggtagagggagttagtgggtagttgagtttgtggatgagttttaaattgtaggggagggtgtaggtagaggggtatttttttgaaaggtgagtaggaaatagtaagtgtttgtggggaaatttttgtgtattgtattttttatttatttgttgtttttttttagttaggaggtattgtagtttttgtttttagagtttgaatttttgatttgatttttgtttttgttaggatgttgtttttagatgttgatagtgtggttgtgttgatggggtgggaagggggttgttggaatgggttgtttttgggtggggagtgtaatttatgaaaatgtggttgggatttgttttagtttgggtgtgtgtttttttgttttgggttagggggttggaaagttgaggaggggtaggattttttatttttggttttatgttgagtagaggttgtggggattggggtgttgtatgagatggaggggtgatttggagagaagatatttttgggtgtggatgttattgggatttgtattttgttttttggaggtttttattttgggaaagtagttggtgggtgtattttaggttagggtgttttttgttggtgtgtagtttttgttttttggtgtttttttttttttgtaggagtggattaaatgtattgtttagttgggttatttttttgttatttagtattttgtggtgtttatatgtggagttgtttttaggtgtgttgagaggtgaggggaaggttatttatagttggatagttagggtttttttttataggtgttgggatttgggttttttttttagttttttggtgaagttttgtattttggggtgttttattttttgtgggttgagggttttagagattattttttttattttgagattttggtgataggatatggtgttttttaggtagggttgattttgggtggagaattagggttaagtgaaggaggttagagagtagatttaaagttggagtagggtgggaagggtggtagaggatttttttttggagttggtttttatagaatggggagtagtaggggaattttttttttttattttattattattttttttatttatagtgttttggttatgtatttaatagatgtttgtttagtttttattatgtattaggtattggattgggtagtaggaatttggtttataggaagat

SEQ ID NO: 59 - DNA, 2251 bp, Artificial Sequence
  chemically treated genomic DNA (Homo sapiens)
ttttttagtgtgattgattgtgatttagaggagaatgggtaggtgtagtgtgagttattgggagatgtgtttttttgttttaagtttttttttaagaattattatattattgttattgaagtttttttggattgagaggtgggggatttttatattttgattgtagtggtttgggattggggtgagtttgtgttttttattagtaagttgatttaggtataagtgttggatgtgaatgataatgtgttgtgttttagttagttggtttatgatgtgtatgtgattgaaaataatgtgtttggtgtttatatttatgtggtgagtgttattgattgggatgagggtgttaatgtttagtttgtttattttatttttgagtgttagatttagggtatgagtgtttttatttatgtttttattaattttgagaatggttatttgtatgttttgtgtttttttgattatgagtagttgaaggattttagtttttaggtggaagtttgggatgttggtagtttttaggtgttggttggtaatgttattgttaatatttttatagtggattaaaatgataatgtttttgttattgtggtgtttttattagggtgtaatgggattttagtgtgtgaggtgttgttttgtttggtggagttgggttatttgtttatttgtgtggttgttgtggatgtggatgatggtgagaatgtttggtttatttatagtattgtgtgtggtaatgaaatgaattttttttgtatggattggtgtattggggagttgtgtatagtatgttgagttttggttaagtgtgatttttagtggttttatgagttggtgattgaggtgtgtgattatgggtagttgttttttttttttattgttattttggtggtttagttggtggatggtgttgtggagttttagggtgggggtgggagtggaggtggagggttaggagagtattagtgttttagttgttttggtggtggggaaattttgttagattttatttttatttttattattgtgttgggtttggtgttttttatttttttgttggttatgattgtgttggttgtgtgttgttaaaaagagaagaagtttaatatttatatttgtttggttagtgattgttgtttttgttgttgttgttgtggtggtggaggtttgatttgttgtggttgttaagtttgggtgtgtaagaagaaatttagtaagttagatattatgttggtgtagagttttaatgtatttagtaatttggtttaggtgttgatagaggagtttgggggttttggtttttattattataattagaattattgttattaggtatgtttgatttttgagtttgttaagattgatttgatgttttttaagttttgtagttttttgtggagtatggatattgagtataatttttgtggggttattgttattggttatattgattagtagtttgatattatttttaatggaagtattttgtttaatgaggtaaggttgaagtgaaaggattattattttttattttttttattagaaagttttttttagtttggtttttgtatttttggtgtattgtatttatttttaggatattagtttatgtgtattgttgtgggagtagagatgggtggttatttttttttatttttttgtgtgtaatttaatttttgtgttgttttatttttttatatttatttttattttgtttttttggtattttgttattttggagtttttttttttgtttttttattttgttagttttttttttttttagtaatttgggtatgaagggaaattgtgtgaagggagagggaaatgtggaggagggatttattttttagtattggtaaaggttttttttttttgtgtttgttttaggtattaataaagttggttttattttgttttgtttaatgatgtttttagttgtgtgtataagtaagttatagattgtttaattttatatagttgtttaattttgaatttatgttttagtgaataagttattagattttttttttttgaatttgggttgtaaaaaaagtttttagtttggttttggatagtatttatagatgtttttgaagttgagtgtttatatagtgtgaatttgaatgaagttgtgttggtataaatttttgttaagagtaaattaatgaaaggtttaaataattgttgttttaaatatatttttttagttaataattatttttttgttattgttttggataaattatgt

SEQ ID NO: 60 - DNA, 2251 bp, Artificial Sequence
  chemically treated genomic DNA (Homo sapiens)
gtgtgatttatttaaaatagtggtaagaaggtgattattagttaaaaagatatatttaagataataattgtttaagttttttgttagtttatttttaataggggtttgtgttaatgtagttttatttaaatttatattgtgtgggtgtttggttttaagagtgtttgtaaatgttgtttagagttgaattgaaggttttttttgtaatttgagtttagaggagaaggatttggtaatttgtttattaaaatatgaatttgaggttagataattgtgtaaagttaaataatttatagtttatttgtatatgtgattaaaagtattgttaaataaagtaaaatagagttaattttattaatgtttgggatagatgtaaagaaaaaagatttttgttagtgttagaaagtaagttttttttttatatttttttttttttttatgtagtttttttttatgtttaggttattgagaagggaaaggattgataggatggaagagtaaaggagggagttttaaggtggtaaagtattaaggggatggaatgaaaataaatgtgaaagggtggaataatgtgaaagttaggttatatatgaaggagtgggagaaggtgattgtttatttttgtttttataatgatatatataagttaatattttaaaaatagatatagtgtattagagatataagggttgggttagaggaggttttttgatggaggagatgagagatggtggtttttttgttttagttttattttgttggataaaatgtttttgttggagatgatattaggttgttggttggtgtaattggtgatgatggttttgtaggggttgtgtttagtgtttgtattttgtgaagggttgtagggtttaagaaatattaggttggttttggtggatttaggggttaggtatatttgatagtagtaattttggttgtggtggtgggagttaaagtttttggatttttttattggtatttgggttgggttattgggtatattggagttttgtattagtatgatgtttgatttgttgagtttttttttgtgtgtttgggtttggtggttatagtaggttgaatttttgttattgtagtagtagtagtagaggtagtaattgttggttagataagtatagatgttgagttttttttttttttggtaatgtatggttagtatgattatggttagtaggaagatgaaggatattgagtttaatgtgatgatgaggatgagggtgaggtttagtgaggtttttttgttgttagagtgattggggtgttggtgtttttttgattttttgtttttgtttttgtttttgttttggggttttatggtgttatttattagttgaattattagggtggtggtggaggaaaggggtggttgtttatggttgtgtattttgattattagtttataaggttgttgggggttgtgtttggttgggatttggtgtgttgtgtgtagttttttggtgtgttagtttatgtgaaagaggtttattttgttgttatgtatgatgttgtaagtgagttgggtgtttttgttgttgtttgtgtttatggtggttatgtgggtgagtaggtaatttggttttgttgagtggggtagtattttatgtgttggagttttgttgtgttttggtagaggtgttatgatggtaggggtgttgttattttgatttattatgaggatgttgatagtggtgttattagttagtgtttgggggttgttagtgttttgggtttttatttgaaaattgaagttttttagttgtttatagttgaaggagtgtagggtgtataagtagttgtttttagagttgatagaaatgtaggtgaagatgtttatgttttggatttggtatttgaggatagagtaggtaagttgggtgttggtgtttttattttggttggtggtgtttattgtgtagatgtaggtgttaggtatgttgtttttagttatatatatgttgtagattggttggttgaaatgtggtgtgttgttgtttatatttgatatttgtatttggattgatttattggtggagagtgtaggtttgttttggttttgagttattatagttagggtgtaggagttttttgttttttggtttaggggggttttggtaatgatggtgtagtaatttttaaaggaagatttgaggtggaaaggtatgttttttagtagtttgtattgtatttgtttatttttttttgagttgtggttagttatgttgaaaag

SEQ ID NO: 61 - DNA, 2553 bp, Artificial Sequence
  chemically treated genomic DNA (Homo sapiens)
ttggttatttttgtttttttttagatttttagagtttttagtgtagttatagaggatgttgttggttttagttttaagaagatgttgttttttttagagggttaagtaagtgggaatttttttttttatttgttttgggttttaggtagggtttttggtgtaaggtttggggttggaagttgatttatttaggtttaggttttggggtagaattgaaattttttggttattgttggttgtagtttgggagtaggttattgttaaagttgtgggtttttttaggatagtttttttatgaggttggttttttatttgttgtttttttatatttggtggttagggatgtggttttgggtagaatgatgattttttatttttgttattatggaagttattgttgttttttagtttagttagttatttgggttgtagagtattttttttatgttttttgggtgtttttttttttttttgttttagtttggttttgttttattttgtttttagggaggggtattttggagtggggttagggtatggtttttttttgagggagtttttttttggttgtttttagggtagttttgtatagttttagtatttggtgtattttttttgatattttttttagggatagttaggtattttgtgtggggtatttaagagagttaggtttgttagtttttagtttttgttagaatgtaggtttgaggggtgaggggtggggtaggggtagggataggaattttggtgtgttttttatttgtaaaggtttattgaggttttgagttttagttattgagttattaagttagtttgggttaggtttgggtgttttgtttgtaatggaggtagagatggggttttggggtagttttgaggatgttgggtgtatagtgggggttttgttggtaggaattatttatgtttttttttgggttaagttttgtggatgtttagtttggggttgtggggagttggtaggttagtggtagatattggtgggtagatttagtgtttggtagaataggtattaaggaagtggtgattggagggaagttaagtgtatttaaatttttgggtgagttattattgttgggttttttatagttgttgaaagtgagtaatagtgatgaaggtttgtgagtttttgtgtgagtgagtgaatggattagtagtagtttttaggttgtggaagagtgttttttttttgggatggggatatttggttatagtaatttttaattttttatttatttattgtttattgtagaggtatgtgggggttttgttttttgtaggtaggagtgaggggtatttttgtgatgtggtatttttgtgattgaggttatgtgtgattggtgtaagggtaggaagtgagttattggtttgtattaggtgtgggggtttttgtgagggtaggatttaaagttggtttggttttttggttgtagtattttttttttttttgaattaggttagagttttgggatgggaggtgttttgtagattattttttttattaatttttgttttttgttttatttttgtggtgatttggtgaattgttggttttttgttgtgtattgagtggggtagtgattttgatgtggtgttttttgttgtttttgttattgttattatttttggtggtttagtttttgtattttttatttttatggaggaatgtattaggtttttttttttggatgtattttttatttatatgtttttaaattttggtattttttgttttttttttatttttatttttttttttaggtttttagataaaggggaagtggttggatttttttaaagggatagtgttttattagtttattgttgaatttttttttttaattttagttttttagttatagttaattagtattagtagatagtttatgagtgatatttatgtaggttttaggttgtggagagttttttgggtaggaaatagtttttaaggttttttattttatttaggttttagttttttttatttgttttttttttagattgtggttttttggagtttggtttttttgtttttgtgtgattgatatatagtatttaaatagtggtagagtgggatggattttttagtttgttttttgtgtgggtttgtattttgatttagatatgtttttttatagtaggatttaggggggtatatgtgtgtttgtgggtttattggggtatttgtatttggtttattttattttttagagagagggttttgttgtgttatttagttggagtgtagtggtgtaattatagtatattgtagtttttaatttttgggtttaagtgattttttttttttagtttttttagtagttgggagtataggatttattgtattttggttaattttttaataattttttaagagatggggttttattgtgttgtttaggttggttttaaatttttggttttaagtgatttttttatttttgttttttgaagtgttgagattataggtatgagttattatgtttattttagattgatatttttatatttgtttattttggttgggtaggg

SEQ ID NO: 62 - DNA, 2553 bp, Artificial Sequence
  chemically treated genomic DNA (Homo sapiens)
ttttgtttagttaggatgaataaatatagaaatgttagtttgggatgggtatggtggtttatgtttgtaattttagtattttaggaggtgaaggtgggaggattatttgaggttagaggtttgaggttagtttgggtaatatagtaagattttattttttaaaaaattattaaaaaattagttaggatatagtgggttttgtatttttagttattagggaggttggggagggaggattgtttgagtttaggagttgaaggttgtagtgtgttatgattatattattgtattttagttgggtgatatagtaagattttttttttaaaaaataaaataaattaaatgtgggtgttttagtgaatttgtaggtatatatgtgtttttttgggttttgttgtgggggggtatgtttgggttagggtatagatttatatagagaataggttagggggtttgttttgttttgttattgtttgggtgttatgtgttggttatatagggatagaagaattaggttttaaagggttataatttaggagagaggtaggtaggaaagattgggatttggatgagatgagggattttaagggttgttttttatttaggaaattttttatagtttggggtttgtatgggtattatttatgggttgtttgttaatgttaattaattgtaattagggaattggggttgaggaggggagtttagtagtaagttggtgggatattgtttttttaagaggatttagttattttttttttgtttgggagtttaggggaaggggtgggagtaaagggggagtagaaaatgttagggtttggaagtatgtgggtgaggggtgtatttaggaagggaggtttggtgtatttttttatgggggtggggaatgtggaggttgggttattggaggtggtggtggtggtaggggtggtaggagatgttatgttagggttattgttttatttggtgtatagtagggggttggtagtttattggattattgtgggggtggggtggaggatggaagttggtgaggggggtggtttatagggtattttttgttttagggttttaatttaatttgaaagggaaaggagtgttgtagttgggaggttaggttgattttgggttttgtttttgtagaagtttttatgtttggtgtagattaatgatttgttttttgtttttatattgattatatatgattttggttataggggtgttatattataggagtgttttttatttttgtttgtaggaagtagggtttttgtatatttttgtagtgggtggtgggtgggtgggggattaggaattgttgtaattaagtgtttttattttggggagggaatgtttttttataatttggaaattgttattggtttatttatttgtttatgtagaaatttataaatttttattattgttgtttatttttagtagttgtgaaagatttggtggtgatgatttatttgagggtttgagtgtatttggtttttttttggttattatttttttgatgtttgttttattagatattaggtttgtttattagtgtttgttattgatttgttagttttttgtggttttaggttgggtatttataaagtttggtttaggagagagtataagtgatttttgttggtgaggtttttgttgtgtatttagtatttttagaattgttttgagattttgtttttgtttttattgtagatagggtatttaggtttggtttaggttgatttggtggtttagtggttggggtttggggttttagtgaatttttgtggatggagagtatgttggagtttttgtttttgtttttgttttgttttttattttttaggtttgtattttggtaggagttagaggttgatgggtttggtttttttgagtgttttatatagagtgtttgattgtttttaagaaggatgttaagggaggtgtgttaggtattgaggttgtgtagagttgttttggggatagttagagaggaatttttttgggggagagttatgttttggttttattttagggtatttttttttgagagtagggtaggataaagttaggttggggtaggagaagggggaggtatttggagggtatgaaaggggtgttttgtagtttaggtggttggttgggttgggagatagtggtggtttttataatgataggagtggagaattattgttttatttagggttatatttttggttattaggtgtgaagaaatagtaggtggaggattggttttatggggagattgttttggaaggatttatagttttggtagtggtttgtttttaggttgtagttgatagtaattaaggagttttagttttgttttagagtttggatttaggtgggttggtttttagttttaggttttatattaggggttttgtttggagtttaggataagtagggagggggatttttatttatttagttttttggaggaagtggtgtttttttggggttgaagttaatagtattttttgtggttatattgggggttttggaggtttaagggagggtaggggtggttag

SEQ ID NO: 63 - DNA, 2001 bp, Artificial Sequence
  chemically treated genomic DNA (Homo sapiens)
ggtaaaagtttgtttggattttttggttattagaaatatgagtatggtggtggtttttagttttttatttatgtttgggtttaagagattgggagtttaggtttattgattttttgagaaagattaagattttgtattttagaaagaggtttggggatttttgttttgtgtaagggtagaaggattagttgtttttttgagtattttaatttggaattttggtttgaagttgagataggagattggatgtgaggtttttttagagttggttttttttaaataatttttaaaatttttagattttaggggtatgttgaaattttttaaagtagtttaaagaatataatgagagttttaatattttaggtggtggtgtgttggttttttggagtggggtgggatgtggttgtgtggatttatgtgtataattgtgtgggatggggttatgtggatttatgtgtataattgtgggattttagtgttagtgggattttagtgttagtgggattttagtgttagtgggattttagtgttagtgggattttagtgttagtgggattttagtgttagtgggattttagtgttagtgggtttgtggtttagtggagtgagtggagtgttggtgatttgagtggagattgtgttttggatgttttagtttagatgttaagttatagtttgtgtagtagtagtaaaggggaaggggtaggagttgggtatagttggatttggaggttgtgatttaggggaaagtgtgggtggttgatttagggtagttgtggtggtgaggtaggtgggttttttgttttttggagttgtttttttttatatttgtttttggtgtttttagtagtttttattttggttttttgtggttattgtgggatttggtgttgttgttagtttagtggggagtgaattagtgtttttttttgtttttggtttttttgatggtatgaggaatttttgttttgttttatagatttttggtttttgttgagtgtggtattggagtttgttttgttagggttttggaattagagaaagttgttttttggttatttgaagtgttggatttttatagtgttttttagtttgggtgggagtggtggttgtgttgttgaaggttggggtttttggtgtgaaagggaggtagttgtagttttagttttattttagaagtggtttttgtattgttgtggtgggtgtttttgggttttgattttgttagtgttgtggggtagaggtatttggagtttgtagggtttagatttgggttggaaaagttttgttgattgtaggtaagtgtttgggaggggtggttaggtgaagttttggtgttttattatatatttttgggttttatgttagttgtatttgtggtattgggtaggaaatggtagggttgaggttgattttaggagtataagggagttttttattttttgtttatatttgttatttttagttttgtaatttattttagatatatagaaagtaagtaggattggtggggagatggagtttaataggaatattttttagtagtgagtaggggttgtatgggatgtgggaggagtttagaggaggtgtggagagtgtttgaggttgggtgagtgtttagaggggagatagttgaattgggtttaagaggtgtttagtgggtgtttgttgaatgaatgagtgatgggttttgaagtttgagtgtattgaaagagggggtgtgtaaaaagggttttttttattatataggatatagtatatgtaaattttttttttgtggaaaagttagataggttaaaaaggttataaataaattagttgggtatggtggtgtgtgtttgtagttttagttattagggaggttgagttaggggaattgtttgaatttgggaggtggagattgtagtgagttaagattgtgttattgtattttagtttggaaatagagtgagattttgttttggaaaaaaaaaaaaaaagttataaattgtgtgtggg

SEQ ID NO: 64 - DNA, 2001 bp, Artificial Sequence
  chemically treated genomic DNA (Homo sapiens)
tttatatatggtttgtaattttttttttttttttttgagatggagttttgttttgtttttaggttggagtgtagtggtgtgattttggtttattgtaatttttgttttttgggtttaagtgatttttttggtttagtttttttagtagttgggattatagatgtgtattattatgtttggttaatttgtttgtaatttttttaatttgtttggtttttttatagggagaggatttgtatatgttgtgttttgtgtgatgaaaggagttttttttatatatttttttttttaatgtatttagattttaaagtttattatttatttatttaataaatatttattaagtattttttgaatttggtttaattattttttttttaggtatttatttaattttgggtattttttgtgttttttttgagttttttttgtgttttatatagtttttgtttattgttggaaaatatttttgttaagttttgtttttttattagttttgtttgttttttgtgtgtttgggataggttgtaaaattggaggtgataaatgtgggtaggaaatggagggtttttttatatttttagggttggttttagttttgttattttttgtttaatattgtggatgtaattggtatgggatttggaagtgtgtggtaaagtgttggggttttgtttggttgttttttttggatgtttgtttgtagttagtgaagtttttttaatttaggtttgggttttgtgagttttaggtgtttttgttttgtggtgttggtgaagttgaagtttgagaatgtttattgtagtgatgtgaaggttgtttttggggtggggttgaggttgtagttgttttttttttgtattaaggattttaatttttagtgatgtagttgttgtttttgtttaggttgggaggtattgtagggatttgatgttttaggtggttaaagagtgattttttttgattttagggttttggtggggtaggttttagtattgtatttggtggaggttgaaggtttgtggggtaggataggagttttttgtgttgttggaagggttgaggatgaaggagggtgttaatttattttttattgggttggtggtaatgttgaattttgtagtgattgtggagggttaaggtgaaaattgttgggggtgttgagggtaggtgtggggaggggtggttttagggagtaaggagtttatttgttttgttgttgtagttgttttgggttgattgtttatgtttttttttgggttatgatttttggatttaattgtgtttggtttttgtttttttttttttgttgttgttgtgtgggttgtaatttgatgtttaggttggggtgtttagggtgtagtttttgtttaggttgttagtgttttatttgttttattgggttatagatttgttggtgttggggttttgttggtgttggggttttgttggtgttggggttttgttggtgttggggttttgttggtgttggggttttgttggtgttggggttttgttggtgttggggttttgtggttgtgtatgtgagtttgtgtggttttgttttgtgtggttgtgtatgtgagtttgtgtggttgtgttttgttttgttttagggagttagtgtgttgttatttgggatgttaggatttttgttgtgttttttggattgttttgggggattttggtgtatttttaggatttaggagttttggaagttgtttgagagaaattagttttgggagggttttgtatttagttttttgttttggttttggattggggttttgggttaaggtgtttagaggaatagttgatttttttatttttgtgtagggtagagatttttaaatttttttttaaaatgtagggttttagttttttttagggagttagtgaatttagatttttagttttttgagtttaagtatgaatagggaattggggattattattatgtttatatttttggtggttaggaagtttaggtaggtttttgtt

SEQ ID NO: 65 - DNA, 219909 bp, Artificial Sequence
  chemically treated genomic DNA (Homo sapiens)
tgttatttgagttgtaaagggtggttttttgtgtttgttttgttgtattgatatattgagttgtgtatggtgtttagtgtagggagaataaatgattatttgtttaatgtgtttatttataggtgaggaaattaaggttttaatttaattgatgtattttgtttttttgattattagaaaagtagtaggataggtgttttgttttgttttattttggtttattaagttggtattttggttttgatttttggttgtgtttggtgttgttgtggtgtttggtgttgttgttttgtttggtggggttgtttggagtgtttgtatttttgtttgtttttatttggttgggtttgttttgtttggatttgggattgggaagtgtggtgatttttggaattagttattggtgttagtgtggggagttgggggtgtagagttgtgggtgtggtgggttatgtaggtggtttttatttttggtttggtttggtttggtttggtttgtgttgttgtgtgggggtgtttttttttaggtttggtgtttgttagttttgttttgttaggtgtagtgtagtgtaggggtgggtgggggtggggtttggtgtgtatgtttatggggtggggagggggtgggttaggggtgggattatagttggttgggttggggttttatgtgtatttttggggaggggtggggtgggggtggggttggggtggggtttggttggtgtattttagatggtgggttgttttttttttttgtttttttattattggtttaggattagtgttttgggagtgtgtgttttgttgttttgttgttatatttttttgggagtggtggttatggaggtattatgaagaagttttatttaggtgggttttgtgtttggggtggggaggggttggtgttttgggattagtgttgtttatttgagtgtttgtggttgggagtggtgaggtgtttttggagttgagtgagtttttgtggtgggtatattgtaggttgagttttttttaggatagggttgttgttgggttgtttttgatttgagttgattgttttttgtgttgtttttagtttttgtttgagtgttggaggggttgttttgggggatgtttttttttttttgttttttgtatttttgtaggaattgttgattttttaggttggttgggtgttttgggtttttgtgtgtttgtgtgggtgaatggggttggggttaggtggaggggtgtttttgggtttagtttttagggttggtggtttaggttgtagtattttttttttggattttttttggttttttttttatttagtggggtatgggatggtttttagatgggattgtttagtagtgtttaaatttggtgatttgggtttatgttttgtgtttaggatgttgtttgtggttgatatttttattttattttagtagggtttgttttaagtaggtgaagggggtttgatttgggttttattatgagttggtttaggagtttttattttataagaggtttttgttttggtattttgaagttttattttatagatgggtatattgaggttataagggtaggttaagagaaatttagatttttattatttgtttttttttttttttttttttttttttgtggttttttttaaaggatttaggtaggtaggattttttgttttttttagtttttaaattataaatagtgtttttttttttaaatttagaaattgtttgtttaatgttttttttttaatttatttagatagaaaggtatttgttaaggatttatgaattaatttttattgataggagaatagaattatgggttttagttggaggtgaaggagttattggggttatttttttgtttttgggttattgttggttttttttggttttttatatttaggaattaaaatgagtgataaagtattttgttttaaagaggattatttagaatttttttgaaaatatttttttgggttagtagtttagaattttaatttttatttggttgttgtgaataagatggttttttatgtatttggagtatagttttgttaggagtgtgggtgggttggtgtgttggtgggtgggagtgggtttttaggtggtatatgtttggttttggtattggggttttttttttaatatgttttaaatatttgagattgttgtggggattgtgtggtgtatggttttttttaggggatttttagtttgtttagggagggttttttgtttttggttttttatattttattttttattggtgggtttagatagtgggggtgattggggtttttttaggttgtgggttttgggttttttttgtggagatttttttgtatagatgttggaagggttttgaggtaggtttggagtttttgtatttgtggtttattgggaggtggggagattattatttgtttttttttttttttttttatatatatttattttattttttattgggttttttttttttttttttttttaaaaaaaaggatagaattttttgtagtaggtggaagtagagtttgtggagtgagtaggaattaatttttgtatagtagttttggtgtttttttgtgtttatttaaaggggtaggtttttttgaggatgggggaagggagggtttagattatttttggtttgttttttgtttggtagtggtttaaggtgtgttgggttattgtgttgtagttgtatggagtgggattggagggggttgatggtgggggtggttttttgtttttattttgagtgttttggagttgttttggtattagtttttttttgggtatgggtatttgtaggagttaggttgattttttaataagttattgatattatgaaattaaggaaagtagtaaaagatgttaaaaattttttaaggttttgataatttaaggataataggaaggtttttatttttttatttagattgtgtgggattattgtttttagatttgtatgtgggttttagaataaatggaatgattataatgttgtttttggtagatttggtttgaatatttgtgagtttttgaaaaggagaaagattttagaaggatgtgttggggtaattttaagtattgtgggtttatagatagttattgaagatattttatgtgttgggtatatatggttaagtttgagtgggtatagaaatggtaatgagatatagtttttgtttgtagagaatttatatttttattgggagttaggatgagggtgagatattagtttattaatattttttttttttgagtagtttagtttttaaatattataggaatgttttggaggttttaggtggaggtgagattgagttgggttttgaggaaggagaagttttgagtagtggagaataaaaagggatttggttaggtgtgtttgaagttttagttatttaggaggttgagatatgaggattgtttgagtttaggaggttatttaggaggttgagatatgaggattgtttgagtttaggaggttatttaggaggttgagataggaggattgtttgaagttaggagtttaaggttgtagttttgtgatagtgtttggaaatagatatggtattttagtttgggtggtgttatgagattttatttgtaagaaggttttttttaatgtggaaggtagtaagggtttatatagggtagttgtaggatttagggggatattggggataggttttttttggtagttttattgttgttttaggtttttttgattgttttatttggttttttaatggggtggaggtagtggtagtttataggtagtgtggtttagtggttatatttgggggtttagagttgttagttttttgggattaaattttattaggttgtgtttttttttgtggtataaggtttttattttatgtattttatttgttttatttgtttttttgtgtgtgtggtgttttttaattttatttatttatttatttttgagatggagttttattttgttttttaggttggagtgtaatggtatgattttagtttattgtaatttttgttttttaggtttaagtgatttttttgttttagttttttgagtggttgggattgtaggaatgtgttattgtgtttagttaatttttatatttttattagagatggggttttattatgttggttaggttgattttgaatttttgattttgtgatttgtttgttttggttttttaaagtgttgtgattataggtatgagttattatgtttagtttgttttatttgttaaatgggatagtgttatgttgttgtaaaggttaaatgagtttatatttgaaaaagttgagaaatgtttgttttgtaatttgttagttgttgttatgattatgattgttattgataggaggatggagaaggttggggttatgttattgttaggatgttttagaagtttttatgatttttttttattgtggttagagtatggtgtagggttttttttttagttttttagtattggagttagttgtattgtatttgttttggttttttaggttttgagttttgggattttttttgtatattaggttatatggaatttgttgttatttttaggtttttttggaaattttttgtgggtggtagtggtaggaggatttatttgaggttgatgagttatagaagtgggattgaggttgtgttatatttttattggtatttgggaattattttggagattttttttttattttttatttttttgagatggagttttgttttgttgtttaggttggagtgtagtggtatgattttggtttattgtaatttttgttttttaggtttaagtaatttttatgttttagttttttgagtagttgggattataggtatgtgttattgtgtttagttaatttttgtattttttagtagagatggggttttattatattggttaggttggttttgaattttggattttaggtgatttatttgttttagttttttaaagtgttgggattataggtatgagttattgtgtttagttattttggagtttttttgtggtttttaggagatttttgaaggggtattagttatgattaaaaagttttatgttgttgtgatttttgagttttgggtagggagggaggttgtatttatataggaagtagtttttgttgtgatttagtgtgttggtttgttgtggtggatagggttgtatttttatttagtgttttgggagttgatttatgggaagggtaaggaattgtatttttagagaatatttttttagttagttaatttggtgataggtgagtgtgggaagggtataagtatagggtttttttttttttttttttagttttgtttttgtgtttgtttttgttgttttttgtttttttatgtttaagtttgtttgttttggtgtatttaggggatttggattggagagaaaaagttattttgtatggttagtttgtggttttgtttgatttgtgttttttgttgaggttttttagttgtgagatagttggttgagtttaagttttggggttagttttttttttagtttgttgtaaaggtagaaaggtatgtttaggtaggggttatttgttttgtttgtttatgttagattgtaggtatttgtttgttagatttttttggtttgtttagagggattttgatagttgagggtaatgtatttggtagtggagtattgtgtttgtgatagtttattttttttttggaattattttttataagtgtgattagtttaagttaggataggtatagggggatttaggattgttatttaggggtagtggtttggaatttaggtttaggtgatatgggagttaattttttgtttggagattttaggtgggtgtttgtagaggatattttatttgaggatttatggaaggggatattttttattttttatttggtttttgggttgtttttttttgatatttttttgttattttaggtagttttgatagttttatgtgattgggatttagaggtggtttttgtttttgttttagtgtttgtttataggtagtgttgtgtgggttttgaagtttgtttaagatggatttgataaggggagtttagtatatattagtgtaggtttggttagggggtgatgatggtagtttttgggtagatttagttggttttagggtaggaggggttttagagagaggttttaggtttttaggggtgtgaatttttggggtgaggtgggaagtgatgtgttgggtttttgtgtttttgtttgttggagttattattttggaaatattttagttttaggtggttgttagggatttatggggattagtgggtgttaatttttgggtgaagtttttggggtttgtatatagtatatagtgttgtggttttatggtttattttgttgtgtgaagtggtttagtttttgggagagtttttagttaggtaggtttgatggtaattgttaggttatggtgatttggaattgttgattaaagggagttagttttggtgggtggagggatttggtgggtagttattgtgatgttaggtatggggattgtgtgttatttaggtttgtgggtgttgagtttttgtgggagtagtgaagtgtttttgtggttgatgggttggttatttttgttttttttttgatgtgatagttgtgtttgggttttgggaaatttgttaggaggtttggtattggtttgttttattggagtggttttgttgagttgtgagttgtttgtttttttgaggtttttagtttattttaattttttatgtggatttggttatttattttagaagtgtttgttgggtgttgttgagtgttaggttttgtttgtttttttttttgtatgttggaggttttgggtattagttttgtagggtggtttggttttgggtttttagggtagagtatggtattttttgtttttagtttagtttttttttgttttatttttttgattttattttgggtatgggtttatttgtagtttttgtgaagggagatattgagttgttgttggtagaggaggggtggtttttgggtattgtttgttaatggttttttggtagttttgtgatagttgagttttgtttttagtttaatttgatttggttttttaaagtatgattgttggtagtttgaaaatttttaggataggaaataggagtggtgtagggaatgtaagatgattttagttttaagttattgggtggtttttagatttaggttgtttgttgtttttggtaggaatttaagttgttggttatttttagagtggtgttggtttggggtttttagtggtttttgtgtttgggtgagaggaattttggatggttattttgttttgagtgtgtgggtttttagaagtgttgggttagggggtatggagggttagaaagttttttttggagtgttggatttttttgttgatttttattttattttggtttggggttttagagaaggggtttaggtaggagtgttatttttttttaatggggatgtggttttagtttttgtttaggtgggtgtattgttttttttttggttttttttaggttgtttaaatgatttgtgatgaggtttgtgttatggttggggttttttgttttttttagtgttgtatttgggaattaggggttgggttttggaagttgaggatgtttttgaatgttatgtttgggtatttgttttggttaggtgaggtgtgttggggtagtggttgagatgggagtagtagtattgtttgttaggtttgagatgggttttgggtgagtgtggttattaggaagggttgggtagagtaggtgggtgggttgtttttggggttttgttttgtagattaatttgatttgtattttggggttggggtttttttttatagtttttttatgaattatggtttttgtttttattttaaattagattttagaagaggaataatgtttatgtaatttaagttagttggaagtgggttatatttaatttttgttattttttagtttgttaaggatttgattaatttaatttagagggatttggagggttgtttgtaaaatttattaataatagggaattttagttttgtagttatagggtttatagaggtgttgggttgttgggttattgttgggaggtgagttggtggtgtagatattatggaggtattggtagtggaagagttgtaagtgtatatagaggttggtattgaggggtggggaggaggaggtggtggattttttgttagtgttggtattatgttgtttttagtattagagatttaaggtgtggttgattttggttggggtgatgagttattggatagtagagtttttttggtagttgggggttaatgttttaattgttgggattttgtattatgttgttttttttttttgttttgtttggtttggtttggtttggtttttgagatggagttttattttgttatttaggttggagtgtggtggtttaattttggtttattgtaatttttgttttttgggtttaagtaatttttttgttttagttttttgaatagttgggattataggtatgtgttattatgtttggttaatttttgtatttttagtagagatggggttttgttatgttggttgggttggttttaaatttttgattttaggtgatttatttgttttggttttttaaagtgttgggattataggtatgagttattgtgtttagtttgtatttatgtttttttttttttttttttgagatggagttttgtttttgttgtttaggttggagtgtaaaggtgtgattttagtttattgtaatttttattttttgggtttaagtgatttttttgttttagttttttaagtagttgggattataggtttgtgttattatgtttggttaattttgtatttttagtatagatggggtgtttttatgttggttaggttggttttgaatttttgattttaggtgatttgtttgttttggttttttaaagtgttgggattataggtgtgagttattgtatttggtttatgttttttattattattatttaattttttaaggaaagtaatttaaattgtatattgtatttttttttttttttttgttttttgttgttagttttttgtattatttattgttaaataatatgaataggaaattgaaaggaaaattttaataattattggttgtagtattttttttgtgttttatttagtgtttgtttttttaggaatatgatatagggtttgatttaattatgaaaggtgtatatttttagagttttatattttttatagaatgaatgttgaattttgttttttttatttgaaattagattttaggtatggattttatgattattattataatggttttttagagtggatattgtattttgtagggaattattttttttttagttgttggtgtggatgtttttttttgatggtgtgggtttgggtttttgaagggtggtgttttgagtaaagatgttatagtagttatgtttatagttttgggtttggggttaggtggagattggttttaattttagagtttgttgttttaaaataaatttttttttttttttttttgagatggagttttgttttgttgtttaggttggagtgtagtggtgtgatttttgtttattgtaagttttgttttttgggtttatattatttttttgttttagtattttgtatagttgggattataggtatttgtttttatgtttggttaattttttgtatttttttagtagaggtggggttttattatgttagttaggatggttttaattttttgattttgtgatttatttgttttagtttttaaagtgttgggataaaataaatttttagggttgggagtggtggtttatatttgtaattttagtattttgagaggttgaggtgggtagattataaggttagaagattgagattatggtgaaattttgtttttattaaaaatataaaaaattagttgggtgtagtggtgggtgtttgtagttttagttatttgggaggttgaggtaggagaatggtatgaatttggaaggtggagtttgtagtgagttgagattgtgttagtgtattttagtttgggtgatagagtgagattttgttttataaataaataaataaataaataaataaataaatttttatatttatttgtattatttattattattattattaaatagggttttgttgtgttgtttaggttggagtgtagtggtgtgattatgattttttagttttgattttttagttttaattggttttttttttttagttttttgagtagttgggattataggtgtgtgttgtatgtttggttaattttttttttttttttttttttgagatagagttttattttgttgtttaggttggagtgttgtggtgtaattttggtttattgtaatttttggtttttggattaaagtaatttttttgttttagttttttgaatagttgtgattataggtatgtgttgttatatttggttaatttttgtatttttagtagggatggggttttattatgttggttaggttggttttaaatttttgattttgtgatttatttgttttggttttttaaagtgttgggattataggtgggagttattgtgtttggtatgtttggttaatttttaaaaaatttttgtagtagttgggtgtggtggtttatgtttgtaattttagtattttgggaggttaaggaggttgggagtttgagattagtttgattaatatggagaaattttgtttttattaaaattataaaattagttgggtatggtggtatatgtttgtaattttagttatttaggaggttgaggtaggagaattgtttgaatttaggaggtgggggttgtagtgagttgagattgtgttatggtattttagtttgggtaaagagagtgaaattttgttttaaaaaatttttgtttttgtttttgtagtgatagggttttgttttgttgttgtttaggttggtattgaatttttagttttaagtgatttttttgttttagttttttaaagtgttgggagtataggtgtgagttattgtgtttggtttttatttgttttggttgtttttttttgttttaggtaattatatatttttttaggtaattaagaaaagattgtgtatgatgagttttttttttggtatttttgggattgtttttaaaattagataagtgtttttattttgatattttattaagattttaatgaatagaatgttgtttgtttttagtttgttggtttttttgtgaaggtttagggtttttttgtttgaaaagttatttttttgttgaggtttttgatttttttttattatggtagttatgttgagggtttatagagttattttttttttattttttttttggttttttaagatgtatttgtatttttggagatgtttttttgtttttttgggttattttttttggttgttatttattttgttgatttattatttgtgtaatagttttttttggaatttttaggtttttgttatttattttttgtagtttttgttttgttttttttgttttagtttttttttttattatttttttatttgttggtttttatttttgtttatggtatatttttgtgttatattttgatggttggataaaggttgagtgaaatgtatttatttttttggtgattggggtgtttattaattagaagggatttaaggttggtgtagtttttttttgtattttggggtattgttttgtggtttttttttgttggagtttgtagttttttgtttttttttttttaaattttttgagatggagttttgttttgttgtttaggttggagtgtagtggtgagattttagtttattgtaatttttgttttttgggtttaattaatttttttgttttagttttttaagtagttgggattataggtgtttgttattatgtttggttaattttggtatttttagtagagatggggtttttttatattggttgggttggttttgaatttttgattttaggtgataggtttgtgttggttttttaaagtgttgagattatgggtatgagttattaggtttggttgttgagattatttttataagttattaggtttggttgtagttggtagtttttgattattggttttgttttatgtgatttgtgattttttttttggttttttggttttgttttgtttatttgtttattttttttatgtatgtggtttgtttatagggtatgtaatggggtttaattaggaaatggaaattgtttgagtatttatttatttatttatttatttatttatttatttattttttttaagataaggttttattttgttatgtaagttgaagtgtagtggtgtgattatagtttatggtagttttgaatttttgagtttaagtgattttttttttttagttttttaagtagtttggattataggtgtatattatatgtttgtttaatttttttttttatttttgtagagatagggttttgttttgttgtttaggttggttttgaatttttaattttaagtaatttttttgttttagttttttaaagtattggagttataggtatgtgttattatgttttgttaatttttgtattttttgtgtgtgtgtaaagataaggttttattatgttgtttaggttggttttgtatttttgggtttatgtgatttttttgtttgggttttttaaagtgttgggattataggtgggagttatagtgtttggtttatttgagtatttagaatagaaggatttaaaggtggggaattagttatatagatgatgggagaggtgaaggttagatagggaatagagaggtaattagtaggaaattaaagtggtgtgggtttatatagttttttaaaggtatggatgtaatgatttatttagaatgagaaaataaataatagtaaattataaattataagtagttgttaaatattataaatattattatatgtagaagagtattagttaattgttagttatatttttaaagttttattttttttatatttttggtattatttttttaatatgatgattttgtaatattgttttttattttgagaatagaaaattgattaggttggatatagtggtttgtgtttgtaattttagtattttgggaggttaaggtaggtggattatttgaggttaggagtttaagattggtttgggtagtgtggtgaaattttgtttttattaaaaatataaaaattagtagggtatggtggtatatatttgtagttttagttatttaggaggttgaggtgggaggattgtttgagtttaggaggttgaggttgtagtgagttgtgattatgttattgtattttagtttgggtgagagagtgagattatgttttaaaaaaaaaaaaaaaataataaaaaaaaatataggttgggtgtggtggtttatgtttgtaattttagtattgtgggaggttgagatgggtggattatttgaggttaggagtttgaaattagtttggttaatatggtgaaattttatttttattaaaaatataaaaaattagttaggtgtgatgatgtatgtttgtaattttagttatttgggaggttgaggtaggagaatggtttgaatttaggaggtagaggttgtagtgggttaagattgtgttattgtattttagtttgggtaatagagtgagattttattttaaaaataaataaataaataaagtgaatgaatttttttagttgattaaattttgtttttatttttggtagttgggatgtatataaaagtggtggttaatatggagttggtggtgttgttataattgttttgtttaagatatataggaattttggtaaattttgtttttttttttttttttaaatgtgatttttattaagaaagaagtaggaaaatgggggagatttttaattgtatatgaggtatttgtgtatgtatttttgattagagagatttttttgttttgattttatattgaaggaattgaattttttgtttataattttatttttggtgatgggagtaattttttatagatttgtttttggatttgtgtattttaaattttgtttttttttattgtgtatgtttttttggtgttaggtattgtaggatatgtttgtgttttgtgatttttgattttgtgtggtaggtggaattggaatggtgagtggagtgagtattgttggaatttgtttttatattgggatagtgagtagtaattgaattatatatggaaataaatgggaattatataaatataatttgattaaagttaaattaaatatttttttagtttaatttttttttagtaggagtttttatgtggtagtaagtttttgtttttattttatataagagaaaatgtgatgggtaggaatttaagattggaaatgaatggggatgttaattgattgtagggaaaatattttttattttgtaaattttataaaaaatgtttgattttgtggatatgtggttagggttttttttagtgttttgagagggaattatgtaggtagagggagggtttttagtattgtgggggtgatttggagattggtagtagggtgttattattatttttaggtggggatgagagggaggaagttttgtgattagagtttaggggttagagttatttgttgggagtttaaataaaggtgggattttggtaggagttggaattatatagaggattattttttttgttggagaagttgtttgaggtagaggaggtggagagtttttgtgtttttttttgtttttattttttaggttttttttaagttttttgttggttgaatttagtttaaagttagtaggtttggggatttggatatttgagttagtagaggttggtgttttttttatataaaggagggtataagaagtgggaggtatggagggggattaggttaggatttatataggatgtgtaaataggagtttttttttttttttattttaaatggtatttgtagttggttttatttttttgttgttagataggaagaggaattttgtttttggtattagttgtttttattgttttttattttatggaggttttttttttttttggtttttgtttgtaattattggtgatgttgatggattatattttttggggagtttggttatgaatatggttttttatttgttgtggattaaattgtgtttttttttttgaatttttgtgttgaagttttaatttttaatgtagttgtaattgaagatagggtttttagggaggtaattaaggttaaatgaagttatagggtaggattttaatttaataggattgatgtttttataagaagagggagagatattagagattttttttttttttttatttgtaaatagaggaaaaatgatggaggatatagtagggaggtgggtataagttaggaagaggggttttgttgggaattaattttgatggtattttgatttgggattttgggttttttaaattgagaaatatatgtttgttgtttaagttattttttttatagtaatttggatggtagtttgagtttattaaggtattgtttgtattagttagggttttttagggagatagttaataggagatggatggatggatggatggttagatagatagataagtggatagagagagagagagataggtagatatagatagataggtagataaatggttagatagataagtagatagagagatagagatagatagatataaataggtaaatagataggtagataaatggatagatagatgatagatagttaggtaggtagatagatatagataggtagatagatagatagatagatgataggttgggtttagtgatttttatttgtaataattagtatattggtaggttgaggttggtggattatttgaggttaggagtttgagattagtttggttaatagggtgaaattttatttttattaaaaatagaaaaattagttgggtgtggtggtgtatgtttgtaattttagttatttgggaggttgaggtatgagaattatttgaatttgggaggtggaggttgtagtgagttgagattatgttattgtattttagtttaggtgataaagtgagattttattttaaaaagaaaaaaaagatagatagatgaatggatagatagttagatagatgatagatggatgataggtagatagataattgataaatagatataaatgattgatggataggtagatatagatatattgattaggtagatgatagatggatagatagaagatagatggtggatgggtgggtagataggtagatagatagttagaaagatagatgatagatagataggaaggaatttattaggggaattggtttatattattgtggaggttaagatgtattatagaaggttgtttgtaagttggaggtttaggaaagttagtattgtggtttagtttaagtttgtaggttttaggattgggaagttgttgatgtaatttttagtttaaggttaaaggtttgagagtttggggaattgttggagaattgggagttttaagtttaagggtaggagaggaaggtattttatttttaggagaaagagggaatttattttttttttgtttttttgttgtttggtaatggaatggtgttatttatattgagggaggatttttattatttagtttattaatttatatgtttattttttttagaaatatttttatagatatatttagaagtgatgtgttattagttattttttaatttagttaaattgatatttgttgttagttattatataggtttagaagaattgtggttgtatggtgatggtttttattttgtttaaagaagttgaagatgaattgttggtataagttattgtttttttaggttttttttagttgtttatttttttaaaaatgtatttattgagtatttgttgtatgttaggtgttgtgataagtattggggtatagtagtgagtaaataaggatttttgttttttggagtttatatgtagtagaaggaaatagaattaatgaatttattagttttagaaattattaaaataggattaagagttgtggtgagaattaagataaggtgattgtatagaaagtgattgatggttgttttggaatgagtggtgaggggttatagagatgatgatagttgagttgagattgggaagataggaaggagttagtagtgtaaggattaggttggaagtaagtttggtgtattttaggaatagtaaggaggttagaggggttgtagtagagtaggtgaggaggaggagggagatgtaggttaaagaggagtttggggttagatggaggattttttttttaaagtttagttattttttttttaaaggagaatgtgttatttttaaaagttatatatgttagtatagtgtttggtttattatatgtttttagtaggtggtgagtatggttgtttttgttattattatattataattattaggaataatggagttattaggttttgtatttatagtaatgtgagggagttagtaagtttttttggggaatttatttttttttattaagtttataagagtttgataattaggttaatgtagtgagagttatagttgtttagtgtattggattttttagttatgggttaggatatttttattttagtagaaatttttaaggggattggggagtgtgttgtggatgtttttgggttatttagattttttggggagttttttttattgtagttgttgtagggagtttagttgtagtgatgaattgtggtttagttttgtttatgggaaaattttatatgggagatgggatggttttttgttggtttttttggttttaggttgtttttataagtgtagggatttttatttgggtgtgtgaatggggtttaggatgttttaagggtatgtggagatgggggttagttgttttttttgatgtttttgaattttttttttttgtttttttgtattttattgttttttggttttttttattttgggtgttttggaataatatgtaatttaatatataggttgattttattattttgttttgttttattttattttattttggaaataaaggttttgttatttagtttggagtgtagtggtgtaattgtaatttattgtagttttgaatttttgggtttaagtgatttttttgttttagttttttaaagtgttgggattataggtatgagttgttgtgtttggtttaggttggttttaaaagttttttattttttttgtattttgatgatatttattttttggagtaggtttttagttattggttttggatattttgtagttattattggttagttgtggtatgtgaagttgaggtttaggagaagggtagttttgtttaaggttatatggtttagtgttaatatttagattttagtgtttttattttttttttggttgtttttatttttagtgtatttttggaggtttaagggagttaaaggttaggttttggttagttaagaatttaaaaaagttgtttttgtgtttttttgttaatttattattttattattttttttgataatgaatttagtttgaattttagataaataaggattaatttttagtataagtatattttataatagatttgggatatatttatgtttaaaaatgatttattgtttgttggttttagtagtttatgtttataattttagtgttttgggaggttatagttggagaattgtttgagtttaggagtttaaggttatagtgagttatgattatgttattgagttttagtttgggtgaagtagtaagatttttatttttttaaaaaattgttgattgtttatttgaaatttaggtttaattgagtattttgtattttatatgagaattttatataggtgagatttagagttttaatgtttattggtaagtttttgtagggaggttttgtgggtttttggttggtattgatgttttgtgatgagtagggttatttggtaaggtggatgtttgttgtttatgtaggtagagtaaggttttgggtaggtatgagttgattttattttttttagtttgggagttagatattgttggtagtttgttgttaagagaggggttggttattaagagaggggtggtttttatgggttttttttggtttttggtttttttttagttttttttttattttaaatagaggttaatggtattgtattagaattagtgtgttgttttttttggttggtattttgtagttgggtagattgttttttttttataggagttggtggtgttttttttgttttatagggaggatggttgagatttttgattttgatatagggtgttgttttttttttgttttgagatagagttttggtttttttatttaggttggagtgtagtggtatgatgttggtttattgtagtttttattttttgggttttagtaatttttttgttttagttttttgagtagttgagattataggtgtgtattattattgagaataatgttttttatagtgtttatttttttgtaggagtaagtttttaaggtaaggaggttgttttttttatggatgaataaattgattttgatttatagttttatgtgttagttttgagggtggggaaaggttgttttgtgtttaggtagggggtgggggtaaggttaggagggtttggtgtttagtgtatttttttaggatataattttaggtagtagaggttaaggatagaggggaggagaagagggaggtggttattatttttttattttagttttttttggagataagtttgagtattttagttgtttattaagtttggagataagtttggaatttaaatttttgattttgatttagttttttatagtttttgtgagtaaattgagttttagaaaaagggagtgaagtttgtgtattttggatgtttttattttaggtttaaattgtttttattttaggtttaaattgtttttattttagtttaaattgtttttattttaggtttaaagtgtttttattttagtttaaagtgtttttattttaggtttaaagtgtttttattttaggtttaaagtgtttttattttaggtttaaattgtttttattttagtttaaattgtttttattttagtttaaattatttttaatataggtttaaattatttttaatttaggtttaaagtatttttattttaggtttaaagtatttttattttaggtttaaagtgtttgtaatttaggtttaaagtgtttttattttagtttaaattgttttattttaggtttaaattgtttttattttaggtttaaattatttttattttaggtttaaattgtttttattttaggtttaaagtgggaaggagttatagggaaataaatgggggaggtatggatgattaggatgagggtttttatgatttatttttttttaggggttattttaagagttttttaaatttttattattttttaatagagatggggttttgttgtgttgtttaggttgatttttaatttttagttttaagttatttttttattttagttttttaaattgttgaggttataggtgtgagttattgtatttggttttttttaggagttttaagaaaaaaaatgggaatagatttgtgtgtgtgtgtgtgtgtgtgtgtgtgtgtgtgtgtgtgtgtgttttgagaaagagttttgttttgttatttaggttggagtgtaatggtatgattttggtttattgtaatttttgttttttgggtttaagtgttttttttgttttagttttttgagtagttgggattataaatatgtaggttgattttgtatttttattagagatggggttttattatgttggttaggttgattttgaattttggattttagatgatttgtttgttttggttttttaaagtgttgggattataggtttgagttattgtgtttggttaggaatagatttttttttgtagatgatttttgttattattgaaaatggatgtttatgtataattgaattgttataatgttttattttaaaaagtttttttttgagaaaatgtgatttttgatagaggagagattgtttaggttttatttattgttagtataaaggtagagtaggggtgtggtggtgttatttttttttgagatagttttatttttgttttgtttaggggtttagaagtttggtttatttgagtttatagaggggtttggagtggttgttttatattataggtggggtttgtaaggatttgaaatgatttttgagaaggtgggtgtggtgggtgtattttaattattaaagtaataataatgatatattaaatagtgtttgtttagattttgagtgtttgtttaaatatttttattttgtgatttgttagattttagtataataatttaggtaaaagaaaaaatagttgggtgtggtggtttgtgtttgtaattttagtgtgaggttaaggtaggaggattgtttgagattaggagtttgagattagtttgggttatttgagattttatttttgaaaataaataaattaataaaagatttttatgttttatgttttttttatatttaggttttttaaattatatgtattggggaaagtttattaagagaagtttttggttgggtgtggtggtttatgtttgtaattttagtattttgggaggttaaggtgggaggattataaggttaggagtttgagattagtttggttaatatggtgaaattttatttttattaaaaatataaaaattagttgggtgtggtagtgtatgtttgtaattttagttatgtaggaggttgaggtaggagaattatttgaatttgggaggtagaggttgtagtgagttaagttggtgttattgtattttagtttgggtgatagaaaaagattttatttttaaataaataaataaagggagagaagtttttgggtttttagatatatgggttagtgtttatttttgtaaagttgttgtgtttaaagaggggttgtatttggtggaattggggtaaaagagtagggagggtattgggtagttgatttggtttttattattggaaaggggttgtgttgttggtgttttgagttggttttataaggaagatattgtatagggtgttttaagtttgttttttttgtttaggtttatttttttttttttaggattagggagttttgtttgttttttgtttttggtatttgttttttggtttgtgagtattgtatttttttttgtttggaatgttggtttatggtgggtttttggatttttgttttttgttgttttttgttatattttgttaaagtgtgttttatttatttattgttattattttttgaaatagagttttgttttgttgtttaggttggagtgtaatggtgtgattttggtttattgtaatttttgttttttgggtttaagtgatttttttgttttggttttttgagtagttgggattataggtgaatgttattatgtttggttaatttttgtatttttagtagagatggggtttttttatgttggttaggttggttttgaattgattttgggtgattggtttatgttagttttttaaattgttgggattataggtgtgagttattatgtttggttaattattataatattgatattataataatattatagttagataatggtgattaatgtttgtaatttgaatattttgggaggttgaggtaggtagattatttgaggttagtttgagattagtttggttaatgtggtgaaattttgtttttattgaatatataaaaattagttggagtgtgatggtaggtgtttgtaattttagttatttgggaggtggaggttgtggtgaattgagattgtgttattgtagtttaatttgggtgatagagtaagattttattttaaaagtagtaataataataataataataataatattatttattgagttttaattttgtgttaggtattgtgttagtatttgtgttatgtgattttattgatttggaataatttatgagtaagtattatttttgtttttaaggaagttgagatttaggaaatggaagttattttttagggtttatagtaagggtttggtgaggtttgtgtttaaattttgattatttgattttaggtttttttgttttttttgttttttaaaaatttaaatatttttatttgggatgattttagatagttagattttaattgttttttttttttttgagtatgttttattttaaaattatataaagataatttattttttaattggagttatggaattgttagatgttttggagatttttttagttatttttttgttggatttagatataggtttgaataattaggtttaaggagttgaattggagttgtttgtggttagaggtttttttttgggaatagtagtggtggtagtggttgtgttgagtttggtaatttgtttaagagtaggggatgtttaggttgtgtttgttttttttttatgaatggtttgttttgtgttttttttgtgttaagggttgttaggtattagatgtttattttaggaaattagaaaaataaatagtgtaaataaaataaaaattttatttaagaaatttgagatagatgttgttttttttattgtttttttatttttatgttgggtttggagagagtgggttagtatgttttttatggataagaggttttggggtatttaatttggatggaattttttttattttttttttgtttggtgttagggggtagaaggtaggggtggtgtttatttggtttagggaggaggatagggtagtttttgttgttggtattttttgtagagatgttttagttagaagtgattttatttttaggaatgtgtgttttgttttttgttgggtggtttttttttattttttattgtttttatagtggggtgtgttagatttatgggtagagttttggtttatttttagttttggatagtagaatgttttagtagtgtattgatggtgtgtgtgtggggatgtgtggaataggggatagtgattttgtgtgtgttatatgtagtgtggtttttagttgggtgtgtgaagggggtgtttatggttattgtggaagtgagtttagttggggttggagggtttaggtttattgtatgttatttagtagttttgggagtggggtttatttttttttttgtttttttttttttttggttttgggtagtttattggagttgtattttgggttattttttttggttttaaggaggttgttatttttgggaggtagatgttggtttttttatttttgttttttggagatttgtgttgaggtttgtttttttgtttggagggattggttaggaatttttgggtttttttggtggggtttttgttgtttagtagtgagtagagtgagtgggtattaagaggaggatgttgggtgaggttatggatatggttggggtaggttgggggtgttggaggtgaattttgtagttgtgtgattttgggtagtttgtttagttttgggttttgtttttttttttatgaaatggggtgggagtatttgtttgttggggttgtgggttgggtgaattggagttaaggtatagtttatagtttgttgttagatttttgtaagtagaagtgggtgtttttgtttagtgttttttggttttttttttaaggtttagttttgtttttattttttttatgaagtttttttggttattttaggagttatgatttatattttttttggagttttgtgttatatgtattttttatggtgttgttttttttggaggatgggtttaattaaaattggggtttatttgggggttttttttagtattagagaagtttaggtttagtagagatgggtattttgttaatattagttttgtgaaggatatattgtgtttattttgttgttagttgttgagtttggtgttttgtagttatggaatatgtgtataggtttgggttgttggatatgaaggttagatgggtagtttattttgtttttgttttgagtttttagaaataagttggttgtatttatttttatttggttatagtttaggagtggggttgtggaatggatggaaggaaggatgagtgggtgggtgggggggtgggtgggtgggtggatggatggatggatgatgggtggatgggttgatggatgggtggattaggtggataggtgaatggattggtgggtgggtgggtgggtgaagggttgaataggtgggttgggtggatgggtggatggatgtgtggaggggtggtggggtggatggggtttatgggtgaatggatggatggatgggtgaatggagtaaatgagtgggtggatggatggatggatgttgtaagagtttttttggagggttttagggaggaattggtatttttgattagtagttagtatggtgattagatatagggaggtgtttgggtttgtttgattttttattttattgttggtgggattgggttggttatgtgtttttgaagttttttgaagggtggttgtatggtattgtttaggggatatttttagagtgttgtgttttatagtaatagggtggttgtttgtgtttttagggttgttttttttggtagttttttgggtttgtttggtttagtattttagtaaatttttttgagttaggatttgtttgttatgagtttttttaataagtagttttaggttaaggtttgtgtgtgggtagagggagtgtatgttgtgggaggttgtattaatttgaggttttgtttttgtttttttttggggtaaaaggtaaaaatagtttgttttattttatttttaaatttagtttggttgtatttagttttgggagtgaagggggttgggttaggattgtttgtgagttgtagattttggtgtagggaaattttgatttataagatgggtggatatggaggaaggaggagattttgtttagtagagatatgtttgggtgtagtttagtttggagtttgatggatgtgggtttatttgtgtgtaatttttatttattgtgtggttatagggaagtgatattttgtggagatttagattttttatttgtaaaataggggtagtagggtttgggggaggatgtgtgtgaaggtttggtttagggtttttttagtagttagatagtagtggttgttatttttttagtgtttagggttatttgggggagtagggtttttgtttttagatgggttttgtttttggttttggaatttatagtaggagtaaaggtgaggatatttttggtgttaattatttatttggagggagagtgttagtggttttgtgtgatttttgttttttgtttttgtttttaggaggtatgtggatttttagtggttggttttggaggtttggtgattttagtggtttaggtaggtggtttgttttgttttggttttatttagtttatgggtgtgtttgtgttggggtttttttattttggtttgggatttgtttttttatttggtttttttggatgagtggggttatttgtttattttttagggagatgtagtttttgatggttttggatttaggtggtttttaggtttgttgatgttgttttgttggagatgatttttgtgggggtaggggtagttatttttaggtttagggagtaagtttgtgtgtgtgggatagaggagagaataggagatagatagggttggatgatttggtttgagatgttgaggggatagatgtgttatggataggtggttttggttgtgagttttttggtgttggtttagtatttgtgggttttttgtaattttgtaggatggaagatgttttaggatagagtagatatgtttggtgttatttaggaggaaataagtgggtttttggtagtggttattgtgttattttttgtgttttttttatgtgtttggaaattttttatattaattagtagggaagggaaatagatgtatttattagagttttggggttggttgtttaggatatgagttatagtttataggtttgaagggattttattaatattgggtgtagtttgggtaagggagtgggatagagaggttagggttttgtttttagtttttgttttttagggttgagtttgtgtgttattttttttttattgggtgtttttgattttttttgtttgattttagtgtggttatgttagtgtttttgtttttgggagtttatgttgtttttggttgttatttttagtggttaggttgggataggtgtttatttagtggtttttttatttggagaggatgatgggttatagtaatgaatggatttattttttttaggagatgaggagttttgagaagagtagagatggtgtggttatttgtgtatatgtgttgggggttaattgggtgttagatttttggttgttattatggtggtagataggtagggattgtgtttttatgaattagttattttagaggagataaagttattaaaggatatggatttggagttaaatttatataaatagagtgtttgtggattagggttgtttttagaataaggtgagatagttgttttgttaggataaggtgtttatgggggtaagggtatgtgtttatttggagttgttatttttatgttttagattagttttgtttaatagaattttttgtgatggtgggtttgttttatatatttgtattttgttattttgtatggtagttgtttagttgtttgggtttattgtatatttaaagtataaatgtttatgtttattttatttatttatttatttgtatagaattatttatttattttaaatggatttttatttatatttatgtgtggttagtggttatgaaattgaatagttttagattatattggtatttgagattttagaattttagatttaaagtttgtttttgattttgagtttgtttttgtggggatagtatagatgttttttaagtttgttttttagaggtggatgtagtgtttgtggattgtgtattattaggtttggatagtggagagggtggttttttatagggagtgggagtggaggggatgttgtgtttatattgagtgtatgtgaggttttttgtagtataggatgggattgtatgtgggaagaggggggtgatgttttggttggaggtttttgggtagttgtatgatttagtgttgtggttaagaggggttttgtttattgtagttatgttgggtattaattattggatagtttagttgttgttgtgtttttggggagtttttttttggttttgtatttgatttgtttttttattttttttttttttattggttagtttttggtggaatgggtggggagggttttttagtttttgtgggggttgtattttgggaatttggtattttgggttgtatggatatagttttttttggtggttgtttttttttgtttagattggttggttttgtgttgttagtatttggtagttatgattatagtttagtttggaagtttaaggtataatttgttgaattttaaagttgtaagttggtgatttgggtttgtgtgggattgtttgttgatatatggggttttttttttgtgggtttttgtgggttttggtttgagatattttttttttatttttttggtttttttttttttttttgttttttttttgttaagattttggtttaggtaggagtttatttttagatgttttagtatttttggtttttttatttgatattttttagatgattgtttgttattttatttttttagtttagtttttttgtagatttatatttggttaattttttatgtttgggatttttgttttttttagaaggatgaaggttttttttgaggttgtgtttgggattgggttagggatgatatttttggtaaaagtttaaatgatattatgattaatgttttggttagtttatatattttttttttttttaaaaaaaaaatggaatttttagagttataaaataaaaatgtaaagaataaggtaataaaatatttgtgtatttattattttgtttaagaagtgagatattgtaggtgtagttgtagttttgggtgattttttttattttagttttatttttgttgtggtgtttgtttttttggattgggatttggttttgggtaggtatatttgtgttgggtagtggtgtgtttgagaagtttaggtttttttttttttttttttgagatagagttttgttttattgtttaggttggagtgtagtggtattattttggtttattgtaatttttgttttttgggtttaagtgatttttttgttttagtttttttagtagttaggattataggtatttgttattatgtttggttaattttttttgtatttttagtagatatagggttttattatgttggttaggttggttttatatttttgattttaggtgatttatttgttttggttttttaaagtgttgggattataggtgtgagttattgtatttggtttggtttttttttgtatatggttattagtattgtgtgattgagtagtttaggtttgtttttttttgaatgttgttattagtattatatttttggtgttttattggagttagtggttgttttgtttgtgtttataatgtgatggtgtggagatttatttgtgtagatttatgaagttttggtttatttattttggtagttagtgagtgtttttttgtgtggggaggtagagtttgtttgttttgtggtttattggtgatattgttgaaggttttttttgttattagtgttgttgggaatgtgtgtttttttaggtggatttggttgggttgtggagatgtgttttttagtttttttagatgttattattatgtttttttgagtggttttttggtaggtttttttatgtttgtttattttttgtgttttaggtagttgtttttttgattgagtgtttagtggatttttgttttgttttttatggtgtatggagtattttattttagtggtgtttgagtttttttttttttggtttttagattttggttgggatttttggagttaatttttttgtttgatattttgtgttgttaggttttgtttttttattttttaatatttttggggtgtgtggttttttttttagtgtttttattattttttttgttttaggttgaattgtgttttttataaatttatgtttattaaaaattttagaatgtgatttgggagttggagatggggtttttgtagatgtaagtagttaaggattttgagatgaggttattttggattagggtgggttttaaatttaataattggtgtttttaaaagaagtagagaggttatagatatattggggagagttatgtgaaggtaggagtagatgatggagtgatgtagttttaggttagggagtgtttgggaagaggtaaggaaggattttttttttattttattttagagtttttttagggagtgtggttttgttgatattttgattttggatttttggtttttagtatgggagagaatttgtttttatttttttaagttttatagttgtggtttattatggtagttataggatattgatgtattttttatttggttgttgtggatggatgattttgtttgtaggaagttttttttaagtattgtaggtgtttttgtttttataggggatgtttgtataagtaggtgtgaaaaaagggttttgtgggggtaaggtttgggttggtgtttgttgtttttttttattttatgttagtttttatgttttttttggtaggagtgtttggttttatttggtgaattagagttaaatttttttgataattggttgttatttatttaattgttattatttttaggagatagaaaatgttagaagggtggggtttgtgtagtgtttttttgttatttttttagggtattgtgttatgttgttttaatgtatagagtagttgtttaaagtgtgttggatgaataggtgttttatgtttagttatgtagataaaagtgtgttatgtggagggagttggttgtggaagagattattagtattttggttgtttgaggattttgtttttgggtttttgtaggtatttttagtttattatttttttttttatttatagttatttattttttttttatttttttgatattagttttgttatttatttaggtttgtaagtaggaaattttagagttgattttgatttttgtttttttagtatttttaggttttaataggttgttaagattttattaatttgttttttgtatattgatttttggataggttgttttggttatggttatgttttggttgggtttttattatttttttttggattagtaggtgttattttttttatttttgttttgttgtggtttttttttttttatggttaatatttagaggatgattattatttttttttttgtgtgttggggattgggtgataggatttttttatttgattatttttattagatttgggttgggtttttttatttatagagtttttagtttttgtttttaaagttttgagggtggatttgtgttgttgtttagtttggttttgatattgttttttagtttggagttttttgtttttgtgtttttggttttgagtgtttgggttttttttggatgggttgttatttgttttttggaaagtagggtttttatgtttttggattttttagttgatttagtgattttgggttattttgttatattttttttattagtttggttttggttatttttgtgttttttatagttttggattagagttatggtgggatgtttttttggtgtgtggtaggtagttaggaaatattgttggattgattttgataggagatgtttgggagaattgtttaaaaaattagtttaaaatgtaaatattggtttttttttgtgttggttaaagagtagtatttttttgtttgttttttgggtaagaaattgatggtgaatgtaatgtttttagggaggagaagaaggtgataaaaagggtttgtataatggggtatatgttaggtatttgtgattatttaagtttaaattataatataaatgtgaaattttttgttttggtagtttttttatattgtaagtgtttattgttatatgtggttgttatattgattatggtagatatagaatattgatattattgtggagagttttatgggggggtgttggtttagattatttttatgttggatttataaatttattgtttatttagtgaatggttattgggtatttattgagtaagtaggatgaaagatatttgtttttgggggagttttttgttggttgtagagaagtttaaatttaggggatttggggtaaattttgtaagggtttttggtttttgtatttttagattttttttgttttgtaggggtagttgggggttttttttaggaatggagtgttagttttagtttttgttaggttatagtttagatggttggttgagtatgagtatgtgagagtggaattgggtttaattgggttgtttttttttgttgttttggtttttttttatgttgatttggaaggatttttaaagtaataggtttgtttaggtggtttgtattagtaaattttgtagtggttttaagggtagagatagttggattgtatttatttaggaatagttaaagtttgaggtataataaaaagtggagaaagattttagagaggaatgtagttggttttagtttgggaatttgttttgtttgggaggttgtaggtgggttaggttggggttagtttggagggttttggttggttttgttggtaggtatagtagtagggttagtaggagggagtttaggatggagtttttttatttttaatttagggaagtaaattttagtggttgagtttgaggatgagtaggaaatgaatggaaaagtttttttttttttttttttttttttaggtagggtttttttttgttttttaggttggagtgtagtggtataattatagtttattgtagttttaatttgttaggtttaagggatttttttgttttagttttttaagtagttgggattatagttgtgtgttattatgattggttaatttttaaaagaaatgtttttaggttaggtatggtgatttatgtttgtaattttagtatttttggagttgaggtgggaggattatttgagtttaggtgttttagattagtttgggtaatatgatgagattttgttttgattaaaaatataaaaagttagttgggtgtggtggtatagttttgtagttttagttatttgggaagttgaggttgtagtgagttgtgattatgttattgttttttagtttgggtaaagggagtaaggttttgttttaaaaaaaaaaattttttttttttttgaggtggagttttgttttgttgtttaggttggagtgtagtggtatgattttggtttattgtaatttttgttttttaggtttaagtgatttttttgttttagttttttaagtagttgggattataggtatgagttattgtgtttggattttttttttttttttttttttttgtagagatgggatttttttatgttgtttaggttggttttgaatttttggttttaagtgatttttttattttggttttttaaagtgttggaattataggtgtgagttattatatttagtaggaaaagttattttttaaagtgagaggttgtgtgttttttatagtttggtgtttattagtatggaggatttattggaatgtgtgttaggtgaggggatatggaagatggtagtaaatttgagtttagagtattagaaagtatgtttttagttaaagatgtgttttttttatttttgtgtagtatttttttttagtgtgtatttttggagtaaggtggggttgattttatgaagatttttttttgaaggtttttgttgtttatattagtgttatttggattgtttgtttttttttttggatggttggattagttttagggttttttggtttggtgtggggagtatagtttattttggggaatgtttggtatgtgttttttttttattgggtattaggggatgaagttgtgttttgtggaaggggatagaggtgttggtgtttaggatggtgtatttggggtggttgaattggatttggtttttattgggtttttgtggagtttagattgttgtgagaaggggtggggaaaggtaggtgatttgtattttttatttttgttttatatgggaataggggtttattttgtatatatatttagtttggagtatgaatttttatgaagaggaaaatttttattaggttttgatgttaggattgtttgtgagggttgggttgtgttttggggtaaggataggagtggagggggtaattagggaaggttttttaatggaggaggtatttgatagtattttgaaaaagaagtagtttttaggttaagttagagattgaagaatgattatttaattttttttttttttttttgagatggaattttgtgttgttgtttaggttggagtgtagtggtgtgatttaggtttattgtaatttttattttttaggtttaagtaatttttttgttttagttttttgaatagttgggattataggtatgtgttattatgtttagttaatttttgtatttttagtagagatggggttttattatgttggttaggttggtttggaatttttgattttgtgatttatttgttttggttttttaaagtgttgggattataggtatgagttattgtatttggttatgattatttaatttttttttataagatgttttttggttgatgtaaagtaggttgagtgagtgtgatattttttttttgtttgtgggttttggtttttttagagtttggttagtgttattggagataaagtggtttttgttttttttttttgttttgttaggtttagtttgtgttgttgagttttattttgtaattaagaggagttgtgaattagtgatgttgatgttgtagaaaagtggttaggggtttatggggggtgaaggatagggatgttgttttgagaattgtttggaaggggtttttgggtaatagtgtttattttagggtgtgggtaggttggggtggttgggagttgggtttataggttggtataattagagttttttaaagttgtgggtttgagggttttgtttttttgggatagtaatttttggtttaatttgggaaaaggtgggttaaattaagtttggtttttttattgtaggattatttagtgtgtttagtatgtaaatgtgtttttgaatttaagataggattatagaaatttttttagtgtttttttggagggagggattgtgggggatttattgtaggggtttgggtttgtattggtttggtgaagtgtttttttagtgtttatattatgtgtggtgagaggttggtttttgttttttttattttttgttggttttattttattatttttgtatttgttttttagttggtttatgattaatttttgtttttttagagttaattggtgttgttaggttttttattttaagtgattttttgtttgggttaaaatgtttggatttttaggtatggaggggagatggattttaggttaaattatgttgggtaaaattgagggttaaggttgtgtttagtaagtgttttagttttggttgttaaatttatagtgtgtatagtgtgtaggaggtggttgggtgaatgaatttagttatagtttggttttttatttggggttgtttttaagtttttattgttagttaggttgggttagagttttgtggggtttttttgggtttttttgttttatagtaggagtttgtatggagagttttgagtgaggttaatgggtttttttttttttttttttttttttttttaatttgagatagggttttattttttttatttagttagggtgtagtagtgtaattatagtttatagtagttttgaatttttggttttaagtaatttttttgttgtagttttttaaagtgttgagattataggtatgtgttattttgtttagttggggtttttgttttttatttttttttttgtttttaaatttaatataaagaaagatattatatttataattagaaaaattaataaggaatattattttaaaattggaaaagggattaaagaaataaattaagaaatttttgtgatttttgtttattggagttagtggttgttagtggttggtttaatataatgttttaggaagaaatagaataatagaaagtaattttagtgagttgagttttggttttgtttgtggtgttgtattagttttttgtagttgttgtaatgagtggttataagttggttgggttataataatgtttagttatttttttatagttttgtaggttatatatttgagattagggttattaggttgaaattagggtgtttattgggtatagttttttggaggttttagggtaggggtttttagttttgtgtgttttattaggaattggtttgtatagtaggaggtgagtgattggtaagtgagtgaagttttatttgtatttatagttattttttattgtttgtattattgtttaagttttgttttttgtttgattagttatggtattggatttttataggagagtgaattgtattgtgaatggtatatgtgagggatttaggttgtgtgttttttatgagaatttgatgtttgatgatttgttattgttttttattattattagatgggattgtttggttgtaggaaaataagtttagggttttaattgattttatattatggtgagttgtataattattttattatatattataataataatagaaataaagtgtataattaatataatgtgtttgtggttgggtgtagtggtttatatttgtaattttagagtgaaattttgttttaaaaaataaaaaataaaggttaggtatagtggtttatgtttgtaattttagtattttgggaggttaaggttggtggattatgaggttaggagtttaagattagtttggttaatatggtgaaattttgtttttattaaaaatataaaaattagttggatatggtggtaggtgtttgtagttttagttttttgggaggttgaggtagaagaattgtttgaatttaggtggtggaggttgtagtgaattgagatagtgttattgtattttagtttgggtggtagagtgagattttgttttaataaaataaaataaaataaaataataaatataatatatttgaattattttaaaattatttttttattttttggtttgtggaaaaattgttttttttgaaattgattttaggtgttaaaaaggttgggggttattgtttttattgtttgtttttttgagtttttggtggttgtgggtgttttttggtttgtggttgtatggtttttatttttaatattagtatttatagatttttttgggttttatttttatttggttatttttgtttgtgttaaatttttttttgtttttgttttgtatgagtattgagattgtttttagggattatttagattatttagggtgtttttgttatagtaagatttgtaattgaattatagatgtaaaaatttttgttttaaataaggttttatttgtaggtttagggattaggatatgttatttttggggttattatttagtttttttttgtgattatgatttttttttttttttttagttttttattttggttgagatgttgtttttattttttttattgtttggttgtttgtggggttgttttttaggttttttgggaggaggtggttgtttgatgttttttagaaggttgggaatggttttttttattttttaggaagatgttttttttgttaaggagattgtatttggggttttattttaggtagagagtggatgggattgtggtttgaagtggtattttagggtttttggttttgttatttagttgagggttgtgtatgggttttatttggttataggtaatttatttggttttgtggggtagggattgtaaatttagaggtttgtggggtgtgttgaggtagaggggtgtaaatattgtaaatttgttgggggttttggggagtagtatagattgaaaagtgttttgtttgaagagtagaattgttttatattagttttgtgtggttaggtaggaaggtttttgtggtgtggttatgtgtttttttttttttaatagaagttgatagtttggagtttttagagagattgtttgagtttttagttttggtataaatatatattttttttaaataggtttgggttaatagaattagtttttgtgttttgggtttgaatgaatttttgaggtgaagtttaaagatagagaggatgtttttgatttttattttagggatttatattgtaaatttttatttgttttgttgagtttttggttttagtatggattttgattatgtgttggtggggattttttaggtaagtaagtagtttttgaggattttggatgaatagtggggaatagtattgattttttagtggggttttgagtttttggagaggaagatttgtttttttttaggggatggttagagatttattgatttatgtgtgtgtggtaggaattttttaggaagtttttgttttgtttgttttttttgtttgggtggggatggtaattgtttttgttattgtagattaatgggatggaggggggtgattttttagggttttttttgggtaggtgttttggaatttttttttagtatgttggtttggggtatggttgttttttttgtttagttatgttggggtatagggtgaagaagggttggggttagtttaggatagaggaaggtgaggtaggtatgtaggaattgggttttttaaatttttaagtttaaggaaattgtagtattgtgggatagggaaaatgaaagattttggaagttgttaggaatttgattttgtgagttggtttttaagagtttaagttaagtatttttaagtggatattaaaaaggagtagtaagttttggggtggtgggggttggaggaggtggagagaggaggttgttggaagttgtatttgggatttttgtagttattgattagattgggtggttgggattttgggatttttgtaggtagatttggtggtttgttggattttttggggtttattttgggtttttttttttgttttttatttttggattttttttttttgttttttttttttttttgttttgaagagataatgttattttagtttggagtataaatatatgattagtatatggaaatgtggtaatttggatgtatttgtgattgtaatagattgaagaaattagattagataaagagtgtttttagaggaggaggaggaggaggaggaggttgagagagggagggtgatgggggtgagaaaggggaggttgtttttgagtgggatgttgggatttttgttgttgttaaatatatttgtaggaatggagagggattggattttaggtatgtagatagttttttttttattggttgttttttattgttttggatttggggttttatttatgtttgggggaataagtatgtaaagggtgtttttgtttattttttatagaaatattttttttttttttgatggttttaagtttgtgggatgaattttgttttagaagttaagtttttttgagtttggtttttatttaaatttggttttttttttttttggttattttttttttattttttagtgtgttatttttgtatgttatggttattgttaatgttgaggttgttggtgttgaaattttgggagggtgtgggggatttgtttttttggtttgggtttggggtggtggtgtttggatttggttggtggttggtttgtttattgtgtggtttgttttttgtttttagttaaagtttgtttttaaggttgttttggttttttatttaaaatagtatttttgtgtttttttggtagttgattatagagggggaagtttttggtgtttagaggagtttggtgtgtgtgtgtatgtgtgtgtgtatgtgtgtgtgtgtgtttatttatgttggtagtttttttgttgtaggtatagatttattagggtgtgaataggtaaatgaagagaaagggggtttttttgtttttagtttattttagttttttaggtttttttttttaggtttagtttttttggtttttttatttatatgtggtgttgtggttgttattttatgtggttagtgttgttattggtaattagtagtgatgatagtttttgttgtttatgttgttttttgagtttagtgttgggagatatggggtggttgagttaagttttaggttttgggtattttgaagtgatttatgggttatggagtgggaggttgttaagagtgttaatttttatgtgttttgggttttggtttgttggttgttattatgtgtgtgttggggggtttttgagaggtttgagagagggaggtttattttggtggtttttttttaggatgtgtggttttttttattattgtttttagggttatatttttttttttttttttttttgagatggagtttggttttgttgtttaggttggagtgtagtggtgtgattttagtttattgtaagttttgtttttttagtttatgttatttttttgttttagttttttaagtagttgggattataggtgtttgttatatttttttgtatttttagtagagatggggttttattgtgttaattaggatggttttgattttttgattttgtgatttgtttgttttagttttttaaagtgttgggattataggtgtgagttatggtgtttggttttagggttatattttgattgttatgttgggattggtggagtgggtgtgtgttgtgttgttgagtatatttagttgggtatagtaggtggattttaggagggggttaggggagatggtagaaggtttgggtggtagtgaaattgtattttatttgtttgagtttgggggtttaggtttgttgggatgggtgggtgtggagtttagtgttttgttttttgtttagtaggagttgtagggtagggagtgttgagagggatttttgttaggtttgtatagtggagttgtttttggagtgattattttattaggtagtttgggtagattatagtgggttttttgttttttgggttattagttttaggaggatgttattttatttgtttggttggtaggggttttggggagttttgggtttggtttttattttatagatgatttagttgaggtttagatgggtgattagtaggggatttgagagttgagtagagaggtgtgggtttgggggtggtgttttttggggagttggaagtgatggtatttttttaggtttataaaatatgggttttttatgaattgaataaaatattttttgaaagtagttagtgttgtgttttagagattattttgatttttgttgtttttggttgaggatagtatagttagggatgaagtggggatttttttttgggttgtgttttgatgaaagatgttttttataaaattttatttggatgtgtttttatgtaagaaaatgtatatttttagaaatttagttgtaaattggttgttttttgaatgaatatgatagttttggagttgttttttttaatgaggtttttgttttgggtaaattttagtgttggtttttaattgttattgaatttttgtatagtttttggggaagtgattttttttttgtttttgttgggtggttttgagtaagttatttggtagttttgggttgtagttttgttatttgtaaggtgaggggtgggagtggtatggtttttaggtagtgtttttattttttgtgggtttttgtgtgtgttttgagttttgtgggtgtttttttttttattgaggggttttttttttttgtagggtatggtttatgttgtgttgttaggttgtaagttattgtgagagttgttttgatttttaagtatgttttggtttgaggaggagttatggggaggatgttgtgtttgtgtgatagaggtttgtttggtagatgttggtttgttgatttttagatgtggttgtgggtgttttatgttttattgggttggtgtgtgaggtgtgtttagtttaggttgttttatagttgtttaggaagggtttgtgggagggggtggttttattttggtgagtttatggtggtttgttagttttagggaaggtttaggagttttaagatttgtttttttgttttttttttggtagtgtttggttttggtttggtttgtgaatgggggtttgggtatttttttgttttttttgggggttgtggtttttttttgggaaggtgttggagggtttgttagtagggttggtatgagttatggagtggtgattggttgttgaggtatggaaggttattttttttagttaagggttggagttttttttttgttttggaatggttttgtggtttttataaattaagtagttttattttgttttaagagtttgtattttagtagggagagagtttttaagaagggaattttttattggggagttttgttgggttgggaggttaggaataggttatgagggagggttgtaggtaggggaagtggttgtttgtgtatggttatgaatgtaggtttggggttttggagggggtttggttatgttgttgttggatgtttgtttttattagggtttatttgatgtagtatggtatagggtaaagtttagttttttttatggggtttttgggttattagtgggtggggaattgaggttttttggagggtggtgttttagtttttattttttttttttgttttttgttgtgttgtttttgatggtttttgttattttttgggagtttttatttttggatgtttggtgtttgtttggttttaatttttttagttttgtttttttatttttgaggtgagaggtttggtttgatgtgttttgtatttgttttttgtttagttttgtgggaattttggtttttgtagtggttttttggggttgttattattaagtgttataaattgggtggtttaaaatattagatatttttttttttgttgttttggaggttagaagtttgaaattatggtattagtaggtttggttttttttggaggttttgagggggagtttgttttttgtttttggtagtttttggtggtttttgaaatttttggtgttttttggtttgtggttatattatttgatttttgtttttgttgttatggggtttttttttgtgttttaaatttttttttgtttgttttttatatggatagttttttttggatttagggtttattgggtaatttaaaatggttttattttaagatttttaattttataatgtttgtaaagattttttttttaaataggttatgtttataggttttggggtggatgtaaattttaggggttattttttatttttttgttgtttttgtgtgtttggatgtatagtatggttttatgttttagattttttgttggatttttttggttttttggggtggtttttggttttttttatttgtttttgtgtttttggtgaggtgttggggttgggtttagtttttgtaggaattttggggatagtatggagttggtaattttttattaggtgtttttttatttgtttagagtttatggttgtgaggggtttttttttgtggttttgatttgtaattttttagtggttagtgatgttgagtatttttttgtgtttattgtttatttgtatatatttttgtagaaatgtttgtttaagttttttatttgtgtttgatttggatgattgttgttgttgagtgttaggagatttgtagattaatatttagatattaattttatatttgatttatgatttgttgttattttatggattgttttttttttatgttgttagtgttttttgatatgtaatttttttttttttttttgagatggagtttgattttgttgtttaggttggagtgtagtggtatgattttggtttattgtaatttttgtttttttggttttagtgatttttttgttttagttttttgagtagttgggattataggtatttgttattatatttagttaatttttgtatttttagtagagatggggttttattgtgttgattaagttggttttgaatttttgattttaagtaatttatttgttttggttttttaaagtgttggagttataggtgtgagttattgtatttaggttgatatgtaaatattttaaatttttatgatgttttattttatttatttgtttttttgttgtttgtgtttttggtgttatatttaagaaattattgttaaatgtaatgttaggaagttttttttttgtgtttttttttaagagttttgtggttttagtttttgagtttaggtttttgatgtaagttgagttgatttttgtatgtggtgtaagggttggtttagttttatgttttgggtttttgatttattttttttttttttttatgtttagttggttttgttgggtggtggggaggagtggggaagttttgggttgggtttgtatttgattatttttttttaggttagttagggagttttagtttttgtttaggatttggttggatgtgttttttattgggaaagtttgggttgtttttttaggttgatggtagggttagtttggggtgttttgaggtttgttttgtggatatgttttttgttttaggtggtgtggttgtttggtttgtgtgtgagattagttgtttgtgttttaggttatggaggttgagtgtttttagtttgtttttttgtttggttttttttttggggaagtttttgtagtttattttttgtttttgtttttgttatttgtgtttttgtttgttttttgtttggaggtggttatttttggggttattttttatgatttggatataagtttttattttgaagttattatttaaatttttgtgttttaaattttttttatttattatatgggtttttattgtgattaatttagtagttgatgaagttttttttggggtttttttagtaatggggagttggtttttttggaggtttggtttttttttaagtggaagtggggtgtgagggtgttagtttttttttgttgtttggtgttttaggttggtttgttatttttggaagtatttgttatttttatatagtattttatatttatttttttgttttttatttttttttttaaggggttatttttgtttttttttttatttaattttatttatgtggtttgtttagtaatttttgatttttaatatgataaaataaattttttttgttggttatttatttatttatttagtattgggtgttttttgtggatttggtgttggggttttgtggaggataaagttagatatagtttttgtttttatgggattgtataagtgtaagattatattagtaaatgtgaaatataggaagtgataggtgtgataaaggggattagtggtaggatagaatttgtggtttgtaggattaggttaggagggttgttttggggggatatttttgggttgagtgtagaaggatgaggggagtaaattaggtttaaatttagtaggtagaggtgattgttgtaggtaattggtaatgtgtttaaaggttttggggtgtggggggttgaggttggtagtatggtaggaagtaagattggggttgaaagagattgattgttatgttgtgaaatatatatttggtttttatttttattttttggtatataatttttaaaatttttggaatttttaaagtgatgtttttttggatgtttatgattgatagattagttggtagttttaggatggtttttagggaagattaggtagaattataaggtttagtattattttgtaatttttaggtaggggagaggggttgaaggttaagtagattattagtggttaatgattgaattaattatgtttttgtaatgaggtttttgtgaatatttagaaggatggggttttgggagtttttggatggatgagtatgtggaggtttttggagggtggagtgtttggggagtatatggaagttttgtgttttttttttatattttgttttatatatttttttttttgtattttttgtaatattttttataataaattagtaaattttatgagttttaggaatatgtgtaaaagaaaaaaaaaagaataaattatagttgttgtagtaagttaattttattagtattggtttttatttgttgattttatttttggtaatgttttttttttttgggtttttgggatttttttggttttattattttttttgtagtggttttgttggttgttgtttttaggttagtttatttttatttggtttgtttttattaggggttgaggtttttttgtttattttagttttttggtttgttttttgttttgggtatttttttattttgaatggttagagtttttgaagttgtttgttgtgtgtttttgtttggttttatgtattttgtatggtgttttttagggttttttattggtaagggtattggtatagattttggggttgttttggtttaagtttattttgatttggagtttgagggtttttgagggggttttgaaggttagggtaggtaaggttggtatgttttgggtagtgggggttgggtatgggaggggattgtgggtggggagattttttttaattagtggtttatgtttggagattgatttgggttttaggttatgttttgaaattgggatagagagtggtgtagattttagtttggagattttttttgtttgtggatgtttttatatttttatttgtggagttatttttttttttttttttttaaatggggaaattttgatttgaatattgaataaataatatatttttgaaattagtgaagaggtattggttttgaaattttgttatgaaagtttgaaaatgttttttggattgatttgttggaatagatgggtgtgatggggttgtggggttttaggtggtaggaggtgtttttgtgtttagggtattttgatgtttagagtttttttgtgtttagtgtgtttttgtatttagggtatttttatgtttagggtgtttttgtgtttagtgtgtttttgtatttagggtatttttatgtttagggtttttttgtgtttagggtgtttttgtatttagagtatttttatgtttagggtgtttttgtatttagggtgtttttgtttttagggtgttttgtgtttagggtgtttttgtgtttagtgtgtttttgtatttagggtgtttttatgtttagggtgtttttatgtttaggtattgtttttttttatttttttaatttttttttattaataggtgttagttgtgaaatgtttgttgtgtgtgttttttggttgagtttattttgtgtttttaagtttttgttagatataggtaggttgttttagtttttttggtaaatgttttgttgttgttgtttgatatggggttttattttgttatttaggttggagtgtagtggtgttattttgttttattgtaatttttgttttttaggtttaagtgatttttttgttttagttttttaaatagttgggatgataggtgtttgttattatgtttggttaatttttgtatttttagtagagatggggttttattatgttggttaggttggttttgattttttgattttaagtgatttatttagtttggttttttaaagtgttgggattataggtatgagttattgtgtttggtttgtttggtgaatgtttattgaggtttattatgtgtagttttttttttaggtgtttggtttgtaatgaggagtaataaagatatagttgttggttgtttgttatttaatagttggaattgagaggtagtttataaatgagtaaatttataggtggttttagatgaggattgtgaagaagttaagaataggttgttgggggtgtatatttgtgtgtgtggtgaggggattaatggaagttttttttgagtggtgatattgagttgaagttgtaatgattagaaggatttagttaggttaaaatttaagggaagagtaatttggtaaaggaaatagtaggtgtgaaggtttgaggttggagtttggggaaggtgggagtggttggagtgtgtttttagagatgggttatggtgatattaatgtgataggtagggttaggttgtgttgggttttggaggttttggtgagggtttgattttatttttattatggtgggattttagtgttttgtggttgttgagaatggttaggggtaggtagggaggtttgttagggaggaggttgttgtaggttttgtagttggagagggaggattaggatttttttagagaggaagttggagagggaggatttttttgattgttggatggatttatttgtttggttgtttttgttagtatttagtagaggttattggatgttgataggtggttggttttgtttagttttgtattgttttgtgttgttttggtggttgttggttttaggaggagtgtttttggtgtttgagtttagtggttttggttgtggtttggtatatttggttgtgggtgaggttaaggtggtttggattttgggaaggttgggtatttggtagttttaaggtaggagttggggtgttggaggaggaagtatgtttattttttgtttttttttgttttgtgggatgttgagtttttgggtagggatatggtgagttttggtgtgatgtatttaatatttgttggtgtttttatttttaagtaggaattttggtgtttggtgtttgaggattgttgtttattgttttattattttttaggtttttttttagtttttgatttggggtaaggtttagatatttagaatatttttggttggtttttggagttggggtgaggtagaattttttttttatatttatagtattagttaaggttttggggtttggatattatttttgggaggggtgagtaggataagtgaggtttttagatttggggtggttttggattggttaggtaggtgggtgggggttgtagtttatgtttttgttttaggtaatatagttgagttgtagtttttgttttatttttagttggggttttttgtgtttattttttgtttttttttttttttttggaatggggggtggatattttaagattagttttttagttattttttttgttttttgtttttttttttttgggatagatttttgtgattgttgggtgtttttgatgttttgttttttttgtgttttgtgttgtgggtgagagagggttttggggggattttttttttttggagtatttgttgttttgggtgtttttgggggtgggtttttattttatattgtggagttggtgtaggaaggaaggtgttgggagttagttttaatttatgtgttggttgtggtttttaaggtgtggatggtaggaggtggtgagatagggatttattgattatgggattgatatttttttatgttgatgtgggttttgagttataattttattagtttttgagttttggtgttgtttttggtgatggtgtggatttagttaggtttttgggtagttttttttggattttttttttgtttttttttgggtagtgtttttgtttatttggaaaggatgggtaggatttggagataatagggatttaaagaagttgggagtgggggtatttgtgtagtttattttgtagaatagataatttggttaaagtttaaagtttgttgttaggagttttgtttgttttttagagagtatatggtttgattattatggggattgggggagaggtataggtatgtttgtttggtagtagaagggaattttgggtttgggtttttttattttgtggtgttgtttttttttagagttgtattgttttttttattgtttttgtttggttttagtgtttatgtggtttgtggtttttagtttgggtttggttttttgtaatttattttgtttagttttatatagtttgtttttttagttgggaattggagtttatttggagttttaggtagtagatttgatgtagtgatgtagggttgttagttatgttagtaggttttgttgtttatagagggatgggtattgttgttgataataattaaagaattatggttttaggttgggtatagtggtttatatttgtaattttagaattttgggaggttgaggtaggagaattaattgaatttaggagttttagattaggttgggtaatatagtaaggttttgtttttataaaaaataaaaaataataataataataaaaattatagttttagaatgattgattttagtatgtttataaagttaagggtttttagtgttttgggtttatgttattgtgttagagggagagaggaagaggttggggtgatgggtattggggtttatgttttttttggaatgggtggttttggattgtgtttgtgtgatatgtttgttgagtgggggtggtgtttattgaggattggatgttgaggtgtgggtggggggaggttatgaagtattgggtattttttgtgtattagtgttttgagattgtagagaggggatttgtttagtttgggtagggaggtgggtggtagtgaggaaggggagaggaatttgggtgtagaaagttttttttttagtaggtggtgttgtaagtttttgagagtttagtttttgtggggtttgtatttttattgaatttgtgggtagaggttgtttgggtgtagtttttgttaattgtgattgtttattgtgggtgaggggaagtggagtgtagagaatgtattggagggtagatgattagtttttgtataggtatgggggtgtttttttttttgtataggtatggggggtttgagtttttggggtttttgttttaattgggtggggaaagggagggttggaagttgagttagggggaaagggggtggttttttgttattttttttattttattttttttatttttggttgataggttttaattttttttatatttttttaattttttgttgtaaaattttttaaatatagaaaagatgaaagagggttgagtgtggtggtttatgattgtaattttagtattttgggaggttgaggtaggaggattatttgagtttaggagtttaagattagtttgggtaatatagtgagattttatttttataaaggatataaaaaattagttaggtatggtggtgtaggtttggagttttagttatttggaaggttgaggtgagaggattgtttgaatttgggaggttgaggttgtagtgagttgggattgtgttaatgtattttagtttgggtgatagaataaaattttgttttaaaaataaaataaaataaaattataaaaaagaaattatgaaagattttaaagtaaatatttatgtatttattatttagattttatagtaattattttgttgtttgttttattataaatttttttggttattagtatttatgttggttttgatgtatttaaaataagttgtagaaattagtatataatattttgttaatattttagtttgtattttattaattagagtttggtatttgtttgtgattatttttgtttttttttgaagtaaaatgtatatattttgagatgtataggtgtgaaatgttttgttttttgaattttaataaaggtatttatgtgtattttagtttgattagaatatagaatattattattattttagtaagttttttatgtttttttaggtgtattatagtttttattttttttagggtaattataattgtgttttttttttattatgaaataattttgttagtttgagtgttttttagagttatttatgttgttgtaggtgttagtgatttgttttgttttattgttgagtaatgtttattgtgtgaatattttgtgggtttttagttatttttttgttgaaagatttttggttgtttttatttggaggtttttatgagtaaatttgttatgttggttttttttgtataagtttttttgtgtatatgggtgtttatttattttgtagaaatatttagagtaggtatagggtaggtatatatttagttttataagaaattgttagatttttttttaaagtggtttttttattttatatttttattagtaatggatatgagttttagttgttttatattttggttaatatttggtgttgttattttgtgaaattttagttattttggtgggtgtgtagtggtattattttattatggttttaatttgttttggtttgatgattaatgtggttgagtatatttttatgattggttttttatatattttttttttgtgaaatgtttttttaaatttgttgtttattttaaaattgggttgtttgatttttttttttggatattgattttttgttagatatgtgttttataaatattttattttagtttgtggtttgtttgtttattttttttttttttttaagaataaggttttgttgtattgtttaagtaggtttgaaatttttgggtttaagttgtttttttgtttttgtttttttaagagttggttttataggtatgagttattatgtttggtttgtttatttttttagtggtattttttaataagtaaaagtgtgttattttaatttttatgaagtttaatttaataaatttttttttttgtggttttttttttgtgttttttgtaagaaatttttgtttattttgttaaattgtaaagatatttatgtttttttttagaaggtttagagttatatagtttttatgaattaatttttgtatatggtgtgaggtagagggttagggtttattttgttgttgttttatgtgtttatttagttgttttaaattttatttttttttaaagtttttattttgtatttttttggtgatttatgaggttgtataattttttaagatttttgttggttatttatgtatttttttttgtaaaattatttgtttatgttttatttttttttaaaattatgttgttttaagattgagtgatttttgaagtttttattttataatgtttgaaagaatgaatattttgttttttagttataggtttttgttttttgttttgtagttgtatagtggggtaagatttgggttttgttttgttgttgttttgttgtttttttatttgattgtttttttatgggttttatttaaaaaaaaaattggttgggtatagtggtttatgtttgtaattttagtattttgggaggttgaggtgggtagattatgaggttaggagattaagattattttggttaatatggtgaaattttatttttattaaaaatataaaaaattagttgggtgtggtggtgggtgtttgtagttttagataattgggaggttgaggtaggaaaatggtgtgaatttgggaggtggagtttgtagtgagttgagattgtattattgtattttagtttaggtgatagagtaagattttgttttaaaaaaaaaaaaaaaaaaaaatgttgttttatatgttttttatatattttggatataagttttttattagatatatgtattataagtttttttttttatattgtttttttttttttggtttttttaatgatgttatttaatgagtaagagtattttgtttttataaagtttaatttattaattttttttagttttgatttatgatttttgtgatttatggaggaaatttttgtttatattaaggttaaaagaagtttttttattttttagaaattttatagttgtatattttatgattttttttattttttaattttttaaatttttatattttttaatttattatagttgttaggatgttgtatgatttattttaaattagtttttgtatttggtttgaggttagggttaatttttgtttttttatatttatatttagttttagtattgtttgttgaaaagatatattttattttattgaattatttgatatttttgttaaaaattattgattgtatatgtggttttatattagtatatgtatgtatatatatgtaggttttgtgttgattgtatgtgtggttttatattagtatatgtatgtatatatatattggttttatgttgattgtatatgtggttttgtattagtatatatatattagttttatattgattgtatatgtggttttgtattagtatatgtatatatatatatgtaggttttatgttgattgtatatgtggttttatattagtatatgtatatttatatatgtaggttttgtgttgattgtatatgtggttttgtattagtatatgtatatatatatatataggttttgtgttgattgtatatgtggttttgtattagtatatgtatatatatatatgtaggttttatgttgattgtatatgtggttttgtattagtatatgtatatatatatatataggttttgtgttgattgtatatgtggttttgtattagtatatgtatatatatatatgtaggttttatgttgattgtatatgtggttttgtattagtatatgtatatatatatatgtaggttttatgttgattgtatatgtagttttatattagtatatgtatatatatatatgtaggttttatgttgattgtatatgtagttttatattagtatatgtatatatatatatgtaggttttatgttgattgtatatgtggttttgtattagtatatgtatatatatatatgtaggttttatgttgattgtatatgtggttttgtattagtatatgtatatatatatatgtaggttttatgttgattgtatatgtggttttgtattagtatatgtatatatatatatgtaggttttatgttgattgtatatgtggttttgtattagtatatgtatatatatatatgtaggttttatgttgattgtatatatatatgtggttttgtattagtatatgtatatatatatatgtaggttttgtgttgattgtatatgtggttttgtattagtatatgtatatatatatatgtaggttttatgttgattgtatatgtggttttatattagtatatgtattgtatatatgtaggttttatgttgattgtatatgtggttttatattagtatatgtattgtatatatgtaggttttgtgttgagatattattgtgtttttttgatattttgtttatttttttgttgatgttatattttgattaatgtggttttatagtaagttttaatataaagttttttaaatatttaaaatattattttgaatattttaggttttttgagtttttttataaatttaagaagtagtttgttgatgtttataaaaatgtagtgtgaattttggttgagattgtgttgaatttgtagattaattaaggaagaattggtattttaataatattgagttttttgtatagatggtatatttttgttttaaaggtttttttgtattttttttatttttttattgaaaaaaaatttttatagaattatattgttttgtagtttttaagaaaaagattttgtatgttatttgttaaatttatttttaagaattttatttttggtattattttaagttgaaatagattttaaattttatttttaattatttgttgttagtatgtaaaaatataatagatttttgtatgtaaattttatattttatgattttttttaaagttatttattattttggtaatggttttgtaggttttttaggatttaaatatatagttttatttttttttgattttgatgttttgttttttttttttgttttattgtattggttagagttgttagtttagtattgaatagtagtgattagtggatatttttgtttgtgttaaatttataatgttaattttagatttgttatatatgatttttgttagattgaggaaatttttttttatttttaatttgttgaaattttttaatatgaatgggtatgattttagtaaatgttttttttgtatttatggaaatgattattgttttgttttttatttgtttaataggataaattataatgattgatttttgttttttgttttttttttttttttttttaaagaaatagagttttatttttgtttaggttgtagtatagtggtgttattgtagtttattgtagtttgaatttttggatttaagtaatttttttattttagttttttaagtagtagggattataggtatatgttattatgttaagttaatttttaatttttaaaattttttgtatagatggggttttattgtgttgtttaggttggtttgtaatttttgagtttaagtaatatttttatttttgttttttaaagtgttgagattataggtgtgagttattgtgtaggtttgattttttaatattgaattaattttgtatttttggaagaagtttaatttgtttatgagatattattttttttatatattgttaaatttgatttgtttagtttttaaggatttttgtgtgttgatttatgagggatattggtgtggtattttttttgtttgttagtttgttttggtaatgtttttgttagttttattttggttttataaaattagtttggaagtgtttttttttttttgttttttgtgtttttataaggttgatgttgttttttttttaaatgtttgatagaatttattaagaaaattgtttggatttagaattttttattaggaaaggtgattgtttgtttttaattataaatttaatttaatgtatagaaagagttatttaggtttttttatttttttttgttttatttttggtaagttgtattttgaaggaatttgttttttttaggtaagttgttgaatttatttatttaaagttgtttgtaatataagtatatttagggtttgtttttagattttggtaataaagtaaatattgtaataaagtatgttatataaattttttggttttttagtatatataaaagttatgtttaggttaggtatggtggtttatgtttgtaattttagttttttgggaggttaaggtgggtggattatttgaggttaggagtttgagaatagtttggttaatatggtgaaattttatttttattagaaatataaaaattagttgggtgtggtggtatatgtttgtagttttagttgtttgggaggttgaggtgggagaattgtttgaatttgggaggtggaggttgtggtgagttgagattatattattgtattttagattgggtgatagggtgagattttattttaaaaaaaaaagaaaaaagttatgtttatattatattatagtttattaaagtgtataagattattatgtttttttgttaaaaaatgttaataattatttgagtttttagtaagttataattttttttttggtagaaggtttgttttaatgttgatggttgttgattaggtggtggttgttgaaagttgaaggtagttgtggtagtagtttttttgttttttttttttttttttttttttttgagatagagttttgttttattgtttaggttggagtgtagtggtatgattttagtttattgtaatttttgttttttgggtttaagtaatttttttgttttagttttttgagtagttgggattataggtgtttgttattatgtttggttaatttttgtatttttagtagagatagggttttattttgttggttaggttggttttaaatttttgattttaggtgatttatttgttttggttttttaaagtgttgggattataggtgtgagttattgtatttggttggtagttttttaattgaagtttttgatatgggttgatttttttttttatgaaagatttttttgtggtatgtattatgtttgatagtattttatttataatagagttttttttaaaattagagttaatttttttaattttggttatggattgattaaataagttgatgtaatattttaaattttttgttgttattttaataatgtttatagtatttttgtttggagtagattttatttttaggaattattttgtttgtttatttataagaagtaattttttatttgtttaagtttgattatgggattgtagtaatttagttttatttttaggttttatttttaattttagttttttgttatttttattatatttgtagtgattttttttgttgaagttttaaattgtttatttatgagggttggaattaattttttttaaatttttgttaatgttgatattttaatttttttttgtgaattataagtgtttttaatggtatttagaatggggaattttttttagaaggtttttaatttattttgtttagatttattagaggaattattaattatggtagatattgttttataaaatatattttttaaataataagatttgaaaattaaatttattttttttttatgggttgtagaatgggtgttatattagtaggtatgaaaataatatttatttttatatatatttttgttagagtttttgggttataaggtgtattgttaatgagtaataatattttgaaaggattttttttttttgagtagtaggttttaatgatttttttttttttttgatggagttttgttgtgttatttagaatggaatgtggtggtatgattttggtttattgtaatttttgttttttgggtttaagtgatttttgtgttttagttttttgagtagttgggattataggtatatattattatgtttggttagtttttgtattttttgtagaaatagggttttattatgttggttaggttggttttgaatttttgattttaggtgatttatttgttttagttttttaaagtattgggattataggtatgagttattgtattgggttttatttgttttttttttgttgttgttttttaattgagatagagttttgttttgttgtttagattggagtgtagtagtgttattttagtttattgtagtttttgttttttaggtttaagtgatttttttgttttagttttttgagtagttgggattgtaggtgtgtattattatgtttggttaatttttgtatttttaatagagatgaggttttattattatgttggttaggttggttttgaatttttgaatttaggtgatttgtttgttttggttttttaaaatgttgggattatagttgtgagttattgtgtttggtttttttttgtttttttgtttttttttaaattgagatagagtttttttttgttgtttaggttggagtatagtggtatgattttggtttattgtaatttttgttttttgggtttaagtggtttttttgttttagttttttaagtagttggaattataggtgtgtgatattatgtttgaataatttttgtatttttagtagagatgtggttttattatgttggttaggttggttttgaatttttgattttaagtgatttttttgttttagtttttaaaagtgttgggattataggtgtgagttgttgtattaggttttaatgggtttttaatatttagtaaattatgttgtaaatagatgtgttgttaagtagggtttgttattttatttttgaagtatagatagaatagatttggtagaatttttaagggttttaggatttttggaatggttaatgagtattggttttaatttatggttaatagttgtgttagttttttatgagagttagtttgttttttgaagttttaaagataggtattgattttttttttttagttatgaaaattttagatgatatttttttttagtagaaggtgggatatttatgttgaaattttgttgtttagtgtagttatttttattagtgttttgagttagattttttgggtaatttgttgttgtttttttattagtatttgttgttttattttgtatttttatattatagagatggtttttttttttaaattttatgatttgatttttgttagttttaaattttttttttttagtttttttattttttttagtttttatattattgaagagagttagggttttgttttggattaggtttttgtttaagggaatgttgtggttgatttgattttttatttagattatttaaattttttttatattagtattaaggttgttttgttttttttttttttatgtgtgtattggaattgtatttttaattttttttaataatttttttttggtatttataatttggttagttatttggtataagagattttatttttgtttgttttggtttttgatatgttttttttatttagtttaattatttttagtttttgatttaaagtgagagatgggtgatttttttttttatttgaatatttagaggttattgtagggttattaattggtttaattttaatattgttgagttttagggaatagggatgtttgagtagagggagagagagtggggaatagttagttagtggagtagttagaatatataatgtttattgaataagtttattgttttatttggatgtggtttgttatgttttaaaaataattgtaataatggtattgaagattattgattattgggtgtggtggtttatgtttgtaattttagtattttgggaggttgaggtaggtggattatttgaggttaggagtttgagattagtttggttaatatggtgaaattttgtttttattaaaaatattaaaattagttaggtgtggtggtgggtgtttgtagttttagttattggggaagttggggtagaagagttgtttgaatttgggaggtggaggttgtagtgagttgagattatattattgtattttattgtattttagtttgggtaatagagtgagattttattttaaaaaaaaaaaaaaagggttgggtgtagtggtttatgtttgtaattttagtattttgggaggttgaggtgggtagattatgaggttaggggattgagattattttggttaatatgatgaaattttgtttttattaaagatatgaaaaaaatagttgggtgtggtggtgggtgtttgtagttttagttatttgggaggttgaggtaggagaatggtgtgaatttgggaggtggagtttgtagtgagttgagattgtgttgttgtattttagatagagtaagattttgttttaaaaaaaaaaaaataaagaaagaaaaaagaaaaaagagattatagattattatagtagatataataataatgaaaaagtttgaattattttaagaattattaaatttttatatagagatatagtgttaatatgttgttggaaaaatggtgttagtagatttatttgatgtagggttgttatgaatttttaatttgtaaaaagtgtagtatttgtgaagtataatgaaatgaggtgtgtttgtgttttttgttattgtaatgttggtaggatttgtaaggaaaatattttattttttttattgtgattttatgtttgttattttttttttattagtagtttggttaggaggttattaatttagatttttttaaagaattagtattggattttttttttttggtgtttatttttttgagtttttttgttatttttattatttttttttttgtatttgttttagtgtattagttagggtttagttaggaaataaaaattatattggtaatttgaatagtaatttgtaatataaagtgtttttaattgtaagaggtagttaattattaaagggattataaaggggtgatattgtgatataagaaagatgtatttgggttgggtttggtgtagtggtttatgtttgtaattttagtattttgggaggttgaggtaggtggattttttgagtttaggagtttgagattagtttgggtaatatggtgaaattttatgtttattaaaaatataaaaaattattttggtgtggtggtgtgtgtttgtggttttagttatttgggaggttgaggtgagaggatagtttgagtttgggaaggtagatgttgtggtgagttgagattgtattattgtattttagtttggatgatagagggagattttgttttaaaaattaatgtatttgtttgtttgtttgtttatttatttatttatttatttatttatttatttatttagtttttgttttttaattttgtttggtatgtagtttttaaaatttttgaaatttttaaagtgatgggtgtttttttgtttgttaaggaggtgattggtggttggaggtttttggatagtttggggataagggttggttgttaggggatttagttttgtgattagaaggttagaatttgtagttttttttatttattttttgtgaggtaagaggggatgaaggttgagttgattattaatggttaaagattttatgttatgtttatgtagtgaagtttttttgaaaatttaaaaggatgaggtttgtagagttttaggttgttgaatatttgtaggtgttgggagggtagtgtatttttttgtggaagttttatgttgttttttttatattttttttatgtattttttttagttggttgtttatttgtattttttgaaatattatttgtaataagttagtaattttaagtaaattgattttttgggttttgtgagttatttaagtaaattattgaatttgagaagggagttgtgaagattttaaatttgtagttaagttagatagaagttatgggtaatttggtgttttattatttgtgattgatttttgaagttgagggtagttttgtgagatggaatttttaatttatgggatttgtattaattttggttggtgttagaattgaattgaattgtaggatatttagttggggattgttgagtattggagaattgtttgggggttggtgggaggaaattatatatttggtgttagagttgaagtattgagtgttgtgaatgagagtggagagatagagtttgttttgttttatgtaagaggattttaaggagtatagaaagagtaaatatgagaagtagttattttagaagaaaatataggaggaaagttttgtgatattggagttggtaatgtttttttggatgtgatattgaaaatataataaaagaaataaatgataaattggattttattaaaatttaaaatttttgtgtattaaggaatattattaatggtgtgaaaaggaaatttatagaatggaagaaagtatttgaaaattgtatatttgataaaggattagtatttagaatatataaagaatttttataattaagttataaaataaaaaaaaataatttagtgaatagatatttttttatagaagatatattaatggttaagaagtataggaagagatgtgtagtgttattaattattagggaaatgaaaattaaagttataataaaatatgattttatattttttaaggtggttgttagttaaaatatggataatagtaagtgttggtaaggatatggagaaattggagttttgtgtattgttggtgggaatgtaaaatggtgtagttgttgtggaaaagatataataattgtttaaaaaattaaatttagaatgattataatatttagtgattttatttttagatgtatattttaaagaattgatagtagggatttgaataggtgtgttatatttttgtttgtagtagtattttttttataattaaaagatgtaggtaatttaggtgtttattagtggatgaatgaatagataaaatgtggtttatttgtatagtggaatattattttgttttaaaaaggaaggagaggttaggtgtggtggtttatgtttgtaattttagtgttttggaaggttgaggtgggtagattatttgaggttaggagtttgagattagtttggttagtatggtgaaattttgtttttgttaaaaatataaaaattagttaggtatgggggtatgtgtttgtaattttagttattagggaggttgaggtaggagaattgtttgaattagggaggtggaggttgtagtgagttgagattatgttattgtattttagtttgggtgatagagtaagattgttttaaaaaaaaaaaaaaaaaaaaaaaaaaaggagattttgatatatgttatagtatagatgagttttgaagatatgttaagtgatagaagttagatatgaaaagataaatattgtatgattttatttttatgaggtttttagagtagttaaatttagagagatagaaagtgggatggaggttgttagaggttgggggaagggagaatgaatgggaagttggtgtttaatggggatagaattgtagtttgggaagatgagatggatggtggtgatggttatataatagtgtgaatgtgttttatgttattaaattgtatatttgaaaatggttaaaatggtaaattttttgtgatggatattttaaggtatgtatgtaaatatatagaagtagttattattattggggttgatggaaaagaaattaagaatttggagtgttttttatattttgttatgttttatgtttaggttttgttggagagtgtgtgattgttatagaaatttgtagtttattggtaataaaaaggtttttgttagaaggtgtagaaagagtggatttgtaggattagtttattgggtagttgagaaatttattagagggtatgggtgggtaggagttgggtgtttgagaagtttgttgaggttttattgggttagagttggggtgttggagaaatttagtatagagtaggttttattgggtatatgttattggtagttgtgtttttagaggaaaaagagattttggaattaggaagagaagttgttattttagtaaggtttggtagttttttatagtgttgttttttgtggatagagtttgatatgattgtatttggttaaggagaaagatttataaggttttggtttagtattatggagtggggtttggtaggatgtatgtagagttaagaggtaatatatgggtaattggtatatttttttagattttttgttttttttgttgttttgttttgttttgttttgttttgttttgttttgagagagtattttgttttgttgtttaggttggagtgtagtggtatgatttaggtttattgtaatttttattttttgggtttaagttatttttttgttttagttttttaagtagttggagatgtttattatgtttagttaatttttgtatttttagtagagatagggttttattatgttggttaggttggttttgaatttttgattttaggtgatttatttgttttggttttttaaagtgttgggattataggtgtgagttatattgtatttggtttatttttttagatttttaaagtagatttttaggtttttttttttttttttttttttttttttttattttttttttaatataagtatttatagtttttttttaagtattagttttagtttatgtattttagtatgttgtgtttttattattattttatttgaaatattgtaaaattttttttgtgattttttttttgatttatgggttatttagaagtatgttgtttaatttgtaaatagttaaggtttttttgagtattttagagttattgatttttaatttaattttattttggttagataagtatattttgtatgtttttaaaatttgagatttatggtttagaatgtgtattttggtgaatgtattgtttttatttgagaaaaaaatatgtatatatattttagattttttgagtatagagttttataattgttgattaggttaattgttagttattagtgttttttagattatttgatgtttgttttttagatgttgagagaatggtgtttgttatggtttatttgtttgtgttttttaaaatttatatgttggagtttaatttttggtgtagtggtgttgggaattggggtattagggaagtattggtttatgagggtagagttattgtgaatgggattagttttttttgttatgtggggatatagtaggaaaaggatatttttgaagtagggagttagtttttattagatattgagtattttgattttggattttttagtttttagaattgtgagtattataatttgtttataaattatttagtttaaggtattttgttttaatattttgaatgaattgaggtggtgttaaaatttttaattatgtatttaggtgtagtggtttatatttgtaattttagtattttaggaggttaaggtgggtggattatttgaggttaggagtttgagattagtttggataatatggtgaaattttgtttttattaaaaatataaaaattagttgggtgtggtggtaggtttttgtaattttagttatttgggaggttgaggtaggagaattgtttgaatttaggaggtggaggttgtagtgagttgagattgtattattgtattttagtttgggtaataagagtgaaattttgttttaaaaaaaaaaaaaaagagtttttatttatgattgtggaattgtttatttttttttttaatttttttaggttttatattatgtattttgaagtttttttggttaggtgtatatatatttatgattataatggtgttttgatgaattgattatttaattatgatgaatgtatttttttattttgtaataattttattttggatttaattttattgatatttatgtagtttttttagtttttttaaatatgttgtttgggatgtataagaaggttggagaggtttatggagaaatttatgatggtttgatttatagttttttaattttattatggtgtgaatgtggtatgtatatagtagaaattgtattttaagtatgtgtgaaattattgtgttttttatttttagtatagtatttaataatttatatgagatagttaatattttattataaaataggttttgtgtttgttgattttgtttaattgtaggttgaagtaagtgttttaattatgttaaggtaggttaggttaagttagaatgtttggtaagttagatgtattaagtgtatttttgagatgatatttattttttatttatgatgggtttgttaagatataattttattattatttaagtagtattagtatgtttttttttaaatagaaaattttaatttgtgtttatattgaaatagtattttttgtagatagtatatagttgagttttgttattttatttattttgatagtttttgttttttaattggaatatttaggttatttttgtttaatatagttatagatatgattgggtttagagttattattttgttttttgatatttattttttttattttgtttttttggttttttttatgttaattaagtattttttagaattttattttaatttatgttttttttttttttttttttttaagatagagttttattttgttgtttaggttggagtgtaatagtatgattttggtttattgtaatttttgttttttgggtttaagtgatttttttgttttagtttttttagtatattgggattatagatgtttgttattatggttggttaatttttgtatttttagtaaagatggggttttattatgttggttaggttggttttgaatttttgattttaggtgatttgtttattttggttttttaaagtgttgggattataagtgtgagttattgagtttggtttgttttgattttttaattgtatttttttgtattgttattttagtagttattttatagattttattgtatatttttagttttttatagtttatttagaattaatattgtttttttttatggaaaaaaagtgtaagaattaggtaattttatgggtttatttattattttttattttgtatgtgatggttgttagatatttattatatttatatatattgtaaattagataatataataaggaaatttttgttttaaatagttttatgtattttaaagaaattaaaagtaaaatagaattttttttatttgtttatgtatttgttatattttgtgttttttatttttttttgaagagttgagtttttatttggttttattttttatgattttggagaatttgttttatggtttttgtagtgtaggtttgtagatagttaatttttttttatttttatttatttgtaaatttttattttgttgttattttttttttttttatttttatttttatttttgagatagagttttattttgtttttttataggttatagtgtaatggtgtgattttaaaatttttgtttaattttaatttattaattttttttttttgggtttaaatgatttttttgttttagttttttaagtagttgggattataggtatgtgttattatatttagttaatttttgtatttttagtagagatgggattttattatgatggttaggttggttttgaatttttgattttaagtgatttgtttgttttggttttttaaaatgttgggattataggtgtgagttattgtgtttagtttgttgttatttttgaattataattttattggttatagaattttgagttgttagtttttttttttaggattttaaaatatagggttttagtgtttttggtttttgttgtttttgttaaggaattagtatttatttagttatttttttgtagattatatgttgtttttttttggatgtttttaagattttttatttaagtttgattgtttagtatttatttttgggtaaaaaagtttttagaaattagaaatttatttagttttatttttttttgttaggtgtagattttattttagtttttatttatttgagatattttatattgattttaggttgttgttattttgtttttttaaatattttgtttagagttataatgttttttgtagaattgattagatagtagttattttttgtgattaggagttttgattttttagatttgttgatgggtttataaagtttttgtttgtggtttttagttggtagtggtttttttgttttgaagttgttatgagtgtgtaaaatttataggtttaattttttttattagtatagtttagaaaagtggaatttttggtttgggtggttatggtgttttagattattggttagattagggtggtgattgttagttggttgaatgtggggtttttagtttagtatttttggattttattttaggagttatggttgttttagggttaggggtttggttttagtttttgtttttttttttttttttttaagttgtttagtattaggttttaattagtattttttgtagatagggtgggttggttttttattagaggggtagggttgggtgggaagtttgttgagtttttttttttgtgtagtttatagttttggggttagttttagaggggtgtagaaaggagtttttaaaggtagaaatttatttttttttttgtttttgtgtttttagggataaaggagaggtggttttagttggggggttattagtggtatgtaggaggtttatatgattattgtttgttggggtttttttttttttgtgagagagatgagagagaggagagagagtgtgagttagggtagtgtttttttttagtaatgtagatttttgtatgtgttttttaggagaaattttgttatttgttagagttttagatttggaagaagttttgtttttttttttttttttagtgtagtgtgtgtgtgtgtgtgtgtgtgtgtgtttttatatgtattatatttttttatagaggaaataatttttgtttaagtgtaaaggttgggattggagtaggtagtatgtgggttaaaggagtagagaggaggaaatgggggtgggggtgagggtgggaataggaggtgggtagatgttatgaggtatgttttttataattagaagggttggtggagatgattagaatgttttagatagattttttattaaatttttaaaatttaattttgttttatgaagtttgaggattttgtagagtgaaagataaggaagggtttttttgtaggggggtgtgtgtgtttgtgtgtgtttgtgtgttgtgtgtttttatgtgtgtgtatgtgtggatttgtgtggtgtgtgtttgtatatgtgtgtatgtgtggatttgtgtggtgtgtgttgagtgtgtatatgtgtgtgtttgtgtgttgtgtatgtatttgtatatgtgtatatagattttattttttttttttttggtttattaagtgttagaaagaatttttgtgagtttttttattttttttaaggttgtatatggagggatttgtgtaggtatatgtgtgtgtgtatataatatatatatatatatatatatatatatatatatatatatatgagttaggggtgagtatttttgtggattgtatttaggtttggtaggaaattgggttttgggaaattgtaggttttatttttggtagaaaattatgtttttgttgttgtttgttgaagggaatattaagtggggttggggatagtttatgttgagaagagtaaattttgtttatggtattggggatattgagtggtttttgttttgggttttggagggtttgggagatatgtttgtagttttgggtattttttaaggttatgggtggttatatttaaggttaggtttttttttgtgtgagttgtggttagtaggaaggttgattttagaggtggttttagggtttttggaggttttgtttttgagatatgggttaaggttagagagttgagaaggttgttgttgaggattttggttggtgtttagtttagtggttttttaggtgggttttgtgtaggggttgatgaagttagttgggaaatttgtgaaataaagtataggttttttaggtttgtttagagttttggtattagatgaggtgtagagaagggaattgagttgttaagtgtgaataggagagaggagttttaggattatataggggttttgatatggtaggtgtttggttagtagtggtgttgtttttattgttggatgtgggaaaatgtattgatatttgttgattagagttggggtgagtatttgggtgattttgtagatgagataaaataagggttgttgtgggggaggggtttttgttgggttattttgttgaggttttgtgttattgttttgtggttgttataataaaggattataaatgaggtgatttaaaatatttgaaattggttatgtgtggtggtttatgtttgtaattttagtattttgggaggttgaggtggttggattatgaggttaggagattgagattattttggttaatatggtgaaattttgtttttattaaaaatataaaaaaaaaaaaaaaattagttgggtgtggtggtgggtgtttgtagttttagttgtttaggaggttgaggtaggagaatggtatgaattttggaggtggaggttgtagtgagttgagattgtgttattgtattttagtttgggtgatagagtaagattttgttttaaaaataaaaataaaaataaaaataaaaatatttgaaatgttttttttaaagtttttggagttagaaattttagattgaggtgtttgaaggtttattttttttgggggttttgagggagattgttttatgtttttttttgagttttgtggtggttagtaatttttggtattttttggtttgtagtttggtttattttttatttggtttttattttgtgtttttttttgtgtttttgtttaaattgttttttttgttgtttttttaatttatttttagggataggtttttattttgttttttaggttggagtgtagtggtgtgattatggtttattgtagttttagttttttaggtttaagtaatttttttattttagttttttaagtagttgggatataggtgtatgttattatgtttggttaattttttaatttttttgtagagatgagggtttaggttggttttaaatttttgtgtttaggtaatgagattttgttttttaaaatattgggattagagatatgagttgttgtgtttagtttatttttgttttataaagatatttgttattggatttagggtttattttgatttaatatgtttttaaataatttaattatatttttaaagattttatgtttatataaagttatatttataggtattggggggttaggatttgtatatgttttttgggggaatataatttaatttataatgggttttatttatagaatgaatggtttttttagggtgtgtgtaggtgggtgaggggtttaggagagggatttgtgtggtaagagggtttgtgtttatgttagagattttagaaggagattggatggggtggttgtatggagtaaggggttatagttattgtttttaagtagttggtgggttgtttggtagaaagggagtatttattttgagtttttttaagatatgaagttagtattaggtatttggaaggtgttagtgagtagagtttgattttttatagaaagaggtgttttttttataatgtttatttgaggatggtggaataggttattttataaggtagtgagttttttatgtttggaagtatttaagtaggggttatgtgggagttgtttaggagtgtatagaagggattttagaggtttttgttaatattatttttgtttgttttattttatgataatttgaattttagaatgtaatgttattggggatatgtttattagaggggtttttagtattaggttttatatattatgtattatttttagggtagggaatgagagtaggttttattttttttggttgtttgtgaggattaggaggtttgttgttgaggtagttttttgtggaaatagtgttttagttttgtaatttatttattggagttttaatattttaatgaaatattgtgttagatgggttttgggtatgtgtgtgtagattgttataagtttatgagaatgtatatatgtatattgtatgtgtgtgtatatatgtatgtatatatgtataagaatatgaagatttgaggtaggtatagtttgtgagatagatttttttaggttgaaagattttttataagggtttttagaataaggttttagttttggtagttttttttatttttggtgggaggatttttatagagaagaagggttaagaagtatagtttttgatgtttatggtgtattaagttttgttttaagtttgtgttttattttttatttatttagtaaatttgttgtttttgttttgtgttagatgttgtttttagtattttataaatattgatgtatgtttgttttatgataattttgtgaagtaggtagtgttattttgttttatagatgaggaaataggtgtagagggataaagggatttgtttaaggtttgtttttattttatatgtatatgaatgtttatttatgtggtaggtgttagtttttttttgatgtgagttaggttttgagttggttggggtttgggttttattttggttgtgttttgttgtgggtattaaggaagtttttagtagttttatttttttggtatgatttagttttagggattggatttttttaaatgtttttgtttagtttggagttttttttttagttgggggagggttgaatgattttttatttttggaggttgttggagttttttttgtttgtatgtggttgttgttgggtggataggtttgtttgtgggttgaggtttttagtagttggggtggattatttttttttttaagaagttttgggagaagtagttgagggggttagtgtttttttgaggttaattttttgttttttttagtgtaggtgtgaagttatttttgtttgtgtgtttgttatagatagtggagggtggtgtaattgtgatgtttgtttgttgtattttgtgtttttgaggatgttgatttttggttggtgttgggtgtttgttttttagttattttgttttgatttggtgtggtaggtttgagtattgtttttttataaggaaataggtttagaggttttgagttatttgtttgggtttttttagttaataattggttgagttaggatttttatttagttttgtgattttagaagtttaagttttttttattatgttagggttaggaaaggattagaatgtttttttatgtgttgattatttggatgatttgtgtagtttagtttgttgtagttgtttaataaaaatgtggaatgaatgggtttatatgttttattgtgtgatttagagttaatgattttggttgatttttttgtttttattttgtggtttagtatttttttttggggtgtgtgattttggaagtagtgattttttttattttattttgaatggtgtttgtgttgtagtaggggagtagttggggattgttagtgtttgttgttggtgggttgtgtgttagattttgttttggatgtgtgggtgattgttagttatatgtgtgtgaagggttgtgtgtgtaggatttgtgtaaatgtgtttttttttgttgttagtttatgggaggttgttaagattttgtttttgtatattagtttatattttttttgtggtttattgttgtggttgtttttttgtgttatgtggttgtaggtatagtttttaagtggatggggattgtgggttgaatgtgtattagatgtttttgttttttggtgggtggagatttttaatttatgtattgtggttgttgtatttgaaaggttttttatggtgaaggatttggatttgagtaattttttgtagaggttttagaagtgttttttggttgggtgtggtggtttatatttgtaattttagtattttgggaggttgaggtgggtggattataaggttaggagattgagattattttggttaatatggtgaaattttgtttttattaaaaatataaaaaattagttgggtgtggtggtgggtgtttgtagttttagttatttgggaggttgaggtaggagaatggtgtgaatttaggaggtggagtttgtagtgagttgagattgtgttattgtattttagtttgggtgatagagtgagattttgttttaaaaaaaaaaaaaaaatgaagtgtttttagtttttttttttgtggtgaggttttgagtttttatttttagaagaaaatttggttggggagggtatttttagatttggatataaatgttaggagattagggttgtttttttaggtgattaattatagagatttagggaaagttatgtttggaagaggtgatattgtgttttagttttatttatttttttattttatagatattgtttggtgtttagtttgtattgtgaggttttttaagtagttttgggtattgtgtatttggtatggtttttagttttatttttttgttttgggagatttggtggggattttgggttgagtttttgtggttgtggaattttggtggtttattgtggtggttgagaatagggatgtggggttggatgggttgagtgtaatttttagtggttttgtgaattgtttgggagttttgggtagtttttttttattttgtgtttttgttttttgatggaaaaatgggggttaggggggagtgattttgaaggtatttgtgggaattaagtgaggtgataaatgtagtgtttttggtagagaattggatatagagtttatttttatgaagggggttgttttttttttttttatgtttttttttgtttttatttttttttttgtattttttttttttgtttttttttttttttttttttttttttatatgtaggtatattttatttggtgttttaattgtttttttttattgtttttttgtaagtggttttttaagtgggaatttaggtttggaaagggtgggtattttgtttggtgggttttggtaggttaggtgttgagtagttttaggagatataattttaggaaaaggtttatgtaggttggttgttatgatggattgttggtgggagaggggaaggtgttgtggtaggggaagttttggaaatatttattagtggttttatttatgatttaggatatttgttaggttattagaatatagttgaggaagttgttggttagatgtttagaagtattaatttggtggttgggttgtggggggatttttttggataggtagataaggtgttggaggaaggggttgatatttatttagtgtttgttatgtattgagggtataaagggtaggatggagagttggtttatgttatttgtggaattttttaggtgtgggggtagatggggaagtaagggggtttgaagatatatgtgtttattaaatgtttttaaattttaagaagaagaataaggatatatttataggggtagggttgaaagtttgatgtatggtgttttggggtttgtttttgttgtaatagttatagtggtttttttttattttttttttttttttattttgttgtgaaaatgtttaaaatatatggttaagttgaaagtattttatagggaatatatttagttattatttagattttattattaatattaagttatatttgttttattattttattgtttatttattttttttttgtttggttatgaatttattttatttttattttttggtgtattttaaagtaattttaggttattttgattatttttggaattattgttagaaatttttttttttttttttttttttttttttttttttttttttgagatgggattttgttaggttatttaggttgaagtgtggtggtgtagttatagtatattgtagtttttaatttttgagtttaagtaatttttttgttttagttttttgagtagttgggattgtaggtatttattattatatttagttttatttttaaaattttttattaattttttattttttgtatttatttaggattattttttataaagttagggtgttgtaggaggggttagaattttaagttttaattttggttttgttattaatattgtgtgatttttagtaaattattttgtttgtttaggttttgtttttatttttatgaaatgagggtgttaaattgtatgttataaataatgagggttattagttattaagtttttattttaggttaggtattttttatatgttattatgagtttttttaatttaggtattgtttttaatggatagtttagttaatggaagtttagagaggtggtgtaatttgttaaaagttttattatttagtgaatgtttttatggggtttgtatttaggagtttgatatagagtttaggttttagtatttggtgatgttttgggggtgtgagtagtttagtttattttgggtatgtgtttatttgttgttttttttgttttatgtttgtgtttgttttttttgaagtttagattgttattttttagttttaaatattaaaattggttaggtatggtggtttatgtttgtaattttagtattttgggagattaaggtgggtggattatttgaagttaggagtttaagattagtttggttaatatggtaaaattttatttttataaaaaatataaaaattagttagatatggtggtgtgtatttgtagttttagttatttaaggagaatttagttatttagttattgaggtatgagaattatttaaatttgggaggtggaggttgtagtgagttgagattgtattatttttttttaggttaggtaataagtgtgagattttgttttaaaaataataaataaataaaataaaataaaaattaaaattaaatgttaaaattaatttataaaataaattttggttaaagtagtttgtttattttgttttaattatgtatattgtattagattttgttaggggtttagtgtataaagatgagatttttgttttgttagataggtgggatgatggttatattttgagttagttaaggtattatttggttgtgtaataaaagttaaaatattagaggttgagtagtatttggatttatgttttagtttaagtgttagttgttatgggggtttaggatagtttggatttagtttatttttttggtgtatttttgatatatagtttttattttttgagttgagatggttttagtttttgttgttatgtttgtattttagttagagggaagggaagaagggagaggggaaagggtaagtgtttttttttatttttaagggtatgatttgaaagttaaatattttagtttttttttattggttagaatttagttgtatggttgtttttgttattagggaggttgagtaatgtattttttagttgggtttttttgtgtataattaaaattttagttattatagaaaaaagggagtttagatattggggaaataattagtatttgtattatatgtattgatagttttttttgtatgaatagagttgtggtaggttttatgttagggagaaagtaagattggaaaagagtttattaaggaggtggtatttgtattgtgtttaaggggtaagaaaaatgttttttaattaggagttataaatgtttggttgaagtgttattgtttttttattttggagttggaatagatgttattagttaattatgatggttgttgggtgtattggttaatatttataattttagtattttgtgaggttgagggtgggaagattgtttggggttaggagtttgagattagtttgggtaaattgtaagattttgtttttgtaaaaaaatataaaatgtagttgagtgtggtggtatttgtagatttagttttagttatttgagaggttgagatgggaggattgtttgggtttaggagtttgaggttgtagtgagttatgattgtattattgtattttagtttgggtgatagagtaggatttgtttttaaaaataataaaataaaattaaagttttaaaatggaaaaaaaattatgagtatataattttagatgtatttttaagatagtaaatttgggtgggtgtagtggtttatgtttgtaattttggtattttgggaggttaaggtgggtggattatttgaggttaggagtttgagattagtttggttaatagttttatttgtattataaatataaaattagttgggtatggtggtgggtatttgtgattttagttatttggaaggttgaggtaggagaattgtttgaatttaggaggtggaggttgtagtgagttaagattatattattgtattttagtttggagaaaaaaagtaaaattttgttttaaaaaaaaaaaaaaaaagtaaatttagggttaggtttgtagttatatggttatttttttttttgagtatggaggtagttttagaaatttgttttatattatattagtgggtagttgattgggttagtttgttagttgaattttatttgttatagttattttttatagtaaggggtattttagatatatttttttttttagggaagaataagttgtagttgtttgagtgttttatttagtggtgtgtatgtttttttttaattttgtgtttagtgatgttttgtttgtagtttgaaatttgttatagtgggtgtgtttatattataggaattggtaaatattatatattaggttttattttttgttttttattagggtaggttgttttttttttgttgtttttgttttttgtttttttttttttttgagatggagttttgttttgttgtttaggttggtgtggagtgatgtgatttttgtttattgtaagttttgtttttttggtttatattatttttttgtttgagtttttagaatagttgggattataggtgtttgttattatatttggttaattttttgtatttttagtagagatggggttttattgtgttagttaggatggttttgattttttgattttgtaatttgttttttttggttttttaaaatgttggtattatgttattgtgtttggtttagggtaggttgttagaaatgtattagtttgttagttttagttttgtttgttttttattttttttttttttttttttttttttgagatggggtttttttttgttgttttttaggttggagtgtagtggtgtgattttggtttattgtaatttttgttttttgggattaagtgatttttttgttttagttttttaagtagttgggattataggtgtttattattatgtttagttaaattttgtatttttagtagagatggggttttattatattggttaggttggtattgaattttttatttaaggtgatttatttgttttggttttttaaagtgttgggattataggtgtgagttattgtattgggttttttttgtttttttttaatgaaaatttttttgaaagatttgtttattgatgtttgtgttaataggtattgtttgtgggatagagtttgttttttttttgaaggtttttttttgtttgggtgattatttgtatgttattttttgttgtttagaattaaagatgtagttatgtttggggtaggttgggaaaatttgtgggaattatagagtttgttgttatgttgtgttttggatatttgaagtttggtaggtaggtgggattgagggtgggtattaggaaagtgatgtggttttataggaaggggatataggttttgagattttaggtttttaattggataaagttgttttttttttttggataaatgttttagtttatttataattgagtggttagtttttttttttttttttttttttttttttttgagatggagttttgtttttttgtttaggttggagtgtagtggtgttattttggtttattgtaagttttgttttttaggtttatgttatttttttgttttagtttttggagtagttgggattataggtgtttgttattgtgtttggttaattttttgtatttttagtagagatagggttttattgtgttagttaggatggttttgattttttgattttgtgatttgtttgttttggttttttaaagtgttgggattataggtgtgagttattgtgtttggttaagtggttagtttttttagttgttgggttttgtatattttgttggttttggagattatatgtattatgtagattttatttgttttttatttttagtgttgggggaggggttaagggtttgttgatgtgttgatatttggttatttattggttttgaatgtttatatttatttttttgaaattgatgttttgtattggaggttttatgtggatttgggggtagaggtttgtattttagatggtggggtggtttttattaattaggtagattttttgttttgttttgttttttgggttttgtagttttagatgtgtgtttaagatttgtggttatatggatgggataagttatagagatttagattttgtggtttttgtgattagagtagttgtggttttgtttgggaatgtttttattttgttgttgaaggtgagaaatttttttgtgttggagaatagttgtgttgagaagttggtttatttggtttgtaggattgttggggtaagggaggtttgttgttggttttttttttttttttttgattgggtgttttttgtttaggttttttgtagtaaaagaattttttaatttattttgtttttttattgagtttttattttatgaagtttattttttaattttagttgattggtttttatttttttaagaggaaggttaggggtagatgaggttgaaggaggttgatttttttgtgtttttgtagtttgagttgatgttgttgtatgtttatagggtttttttagtttttaaaaaggttttaatatgtttgttatatgtttgtggtttttttggatgttatattaatttagtaaggtttgagttagaggttgtttttgaggttgtgaaaatagaagaagggtttagaggagaatttttttatttgatgattttaggaaggttttttagaagaagtagtttttgagttgagatttgaagatagattaggtttgagttaggttagggagggtgtgaggggtttattaggtagagggaataggatagggtaggtatagaggtttggtatttggtttgtggggaagtgtgagtttttgggtatgattaaggtggggagaagtggtgtgagaggaggtagatgtggttggtaggagattggtggttttggttttgttgagttttattttgtatgtattaggtgatagaggttgtttaggatggtgggtagggaagtgataggttatatggttattttattaatagttgggagtttagtttggggggatttaagattttggggaaggtatgagttaggggtttgttagagttaggagttagtgggagaaggaaatagtgttgtttatgaattataaatagatatttttgtaattttttttgatgtgatataattttaaagtgggttatttagaggtgggaaggtgatttttggttttttaggttttgggtttgttttttttttttttttttttttttttttgagatggagttttattttgttgtttaggttggagtgtagtggtgtaattttggtttattattatttttgttttttgtgtttaagtaatttttttgttttagttttttgagtagttgggattataggtatttgttattatatttggttaatttttgtatttttagtagagatggtgttttattatgttggttaggttggttttgaatttttgattttaggtgatttgtttattttggttttttaaagtgttgggattataggtatgagttattgtgtttagttgagtttatttttaagttttttttggtttttagtgtttttgtattagtttatttttttggttttttgtttttaagagttttttttaagattgtttttaagtggataggtttttagaattaaggagtagttttaggagtttttagttatagatattttagggggtttgtgtggtttttagtttttggtttggttttggtagttttggttttttgtgttgttttttatatagtttggttagagttggttaggttttttggttgggttgagttattgtggttagtgatttatgtagggggagaaaagtgaggagggggaatagagtgtgagggggattgtgttaataataaatttattaggtttttgaggttattttataggagggataaatggtttatttaggttgatttggttgttggttggtttttagagatatttagggtggggaagattttattatttggggaaagtaatattagattgtttggaggggtttagttagtgtattttgtgttttttgtttgttttttatgtagagtgttttgtttttaaggtggtaggttaagagtgtgagttgaggtttaggtgtaaagaggggtgtggtatgggggtattgtagggtatggggtgtatgtatttttatttatttttttattgagtgttagggtaatttgttaatggggtatatttggtgatataaaattttttgttgatttatggtagtttggaatggagtggaagtgttttatttttggggaatttttatatatatttggttgtgaatgttggtgtttttgtattggagtttttttggagtgtgttgggtagagtggagaggtttttttttttttttttttattattttgtggaggtgttaatatgtagttagagatggttagtggtagtgaggagaggggggtaggaagagattagggttgggggtttgttagtttatagttttatttttgaatatttatggtttttttgtttaggttagtgaggttgggggtagagatgggtaggggttttttaatgttgggtatttttttgtttttttatattttggatttgttttttggagaaagttttggagtatttagaagttttggggttgttggttgaggtggggagtagagtttagttgtgtttggaggttttttatttttatttagtttttagggatagttttagttgtgtaggtttaggttgttgaggttggttttagaaatttttttataattattattggatggaaaattagttttttaaagggttttagagttagttttgtttttttttttataggtttttatagttagagtattgggtttttgttagagatgtagaagagatgatgtttttagtttttatgtggtttggtttttattgtggatgttggtgattttagttttttttttaaaattaagagggttgatgttttatattttaggtttttagaaagagttgttatttatttatattgttatattttttttttatttttttgttttggaaagagtagagtggatatgtgtttttgtagaaatttatttatagtttgattgtagatgtattttgtttttttattgagtttttgttttatgaagtttgttttgtttgtattttttttttttttttttttttttttttttttttttttttttttttttgtttttttttttttttttttttttttgttttattttttttttttttttttttttttttttttttttttttttttttttttgttttttttattttttttttttttttttttttttttttttgaatagttaaagatagaatgaatggtataggtaggtattgagttttttgtaattggaggtgtttaagtgtagggtggatgggtatttatagggtaggtattgaggaaggatttttttgggattgtggatggtaggataggttttgtggagttttttgagtgggtgtagaagagggagggtatgtttttgttttttgttttttttgggttgttaggttgttatttttaatttttattttttttttttttatttgttgggttttatgggatgggtagaggtattgttagaatatggagttgtggtttatagagggttagtagggaggagagttttttggggattatgttgttttagttattgtggtgattttgaaaataaatgtttttttttttgtttgagtttttgttgtttttgttgatgtggaattagggtaggttggtgatttagtttttatttttgtattgtattggtggtaagttgtttttagttttagattttatagagtagggtgttttttttagaaaaatagtagggaggttaggatattaagggttttagggatagtttgttttttttggttggtatgagttttagttaagttttttggtattttgggggtgaggaggtattagttgtgtgttttagttattggttgttttgaggttgggttggtgttaggttggttatttttttttgttttttagtgtgattttgtagagtttttggaagggttagagggtttttttttattattggtgtttatgggatattgtgtttttattttatttttgtattttagttttagatgggtgttaggaagttggagattttagttattttatgattgtgttttgtggggttggagtaggaataggagtaggaggaatgttttggttatgggattgtgtgaagagagaaggattaggaagaaaatatgagttattatgtttgggttatattttagtagagttgttggtggttttttaggtatttgaatttattaattataaagtttattaggtgtgtaaataaataaatgttgtttaggaggtatagttagggttttgttggagagggattattttggaggggttatattttttatttagttttttagtttttttgttttgtgtgtgtgtagtttttgattattattatttttgtttttgttatttgtttttagggttttattaggttggatgttattgtaataaaatgtagtaatagaaggtttaggtagtgttgtagtttttggtggtattattagagttagtaggtagtagggttggggaattttaagttgatttagttttaagtgttggagtggggagtttggatgaggtgggggtggggaattggggagttatggagtagagtatttgttgtgttgaaggttaggagtttttttgggagattatgaatttagaatattaatattttgtttaaaaagttttttgttttggagataagagtttaggttgttgtggttaggttttgttgtaaatgttttgtataaagtaggttggggggattattgggaagtttggggaatagattggttatgtgtttttttgagtgaaattttatggttgtattgaagtggttaggtagagggtgtgatggggtgtggtagttgtatattggtttagttaggttgaatggggaaatgtaaatttaggtggtttgaaagagatttagtggtttatagtttggtggttgtttttagtataggtgatgtaaagagagaaggggttttgggggtttggtttaggtggaaattatgtattgtttgtgattttgggtatgttgaggttggagtaggtttgtttggtggttggtagaatgtatatgaagaatttatgtgtgttttgaatgttttttttgtttttttgggtttatgttttattaggagttttttgattttgttattttgtaaaggaaattgtgttttgttattgtataggattgaataggtgtgtgtggagtttttaaagttattgttttaaggggttttatgggataatgggagagttgttgtgatgtttaagattaaagtgatggttgggtgtagtggtttatgtttgtaattttagtattttgggaggttgaggaggatggattatttgaggttaggagtttgagattattttggttaatatggtgaaattttatttttattaaaaaaataaaaattagttgggtatggtagtgggtgtttgtaattttagttatttgggaggttgaggtaggagaattgttttgatttgggaggtggaggttgtagtgagttgagattatgttattatattatagtttgggtgatagagtgagattgtttaaaataataataatgttaataataaataaaataataataataaaataataaaagtaaggatttgaataaatatttgtatatttatgtttgtagtagttttatttttaattgtttaaatgtggaaggaatggatatataaagtgtgtgtatatatagtggaatattatttagtttttaaaaggaatggaattttgttattatatgtgaattttgaataatgaattttgaagattttatgttatgtaagtttgttttataaggataaatattgtatgattttatttatgtgaagttaaatttatagagaaattggaatgatggttgttagtagttaggggaaggaaggatggggagttattgtttaatgaggatagagttttagtttgggaagttggaagaagttttggaggtggatggtgttgatgggtgtataatgtgaatgtatttaatgttattaatatggaaatttggttaaaatggtaaatttgttttttttgtttttgttttttttttttttgagatggagttttgttttgttgtttaggttggagtgtattggtgtgattttggtttattgtaatttttgttttttaggtttaggtgatttttgtgttttagttttttagagagttgggattataggtgtttgttattatgtttggttgatttttgtatttttagtagagatagggttttattatgttggttaggttggttttgaatttttgattttaggtgatttatttattttggttttttaaagtgttgggattataggtgtgagttatggtggttggttaaaaatggtaaattttatattatatatattttattatagtaaaaatgtattgttttattagaaaaatgatagatttttataatatgaattaaattataagttatgaaggaaaaattaagtaaaatattaaaaaattatttataagtaattatatttaaaataaaagataataaatatataatttttattattttttaggttttttgtaatatttaattattgtttgttttgttgtggttatgtttttgaggttgtatttgtatgatagaaatattatatttgtggtgattaaatatttttttttagttttatttttaatgatgttatatagataatttgaaattggttggttgggtatgatggtttatgtttgtaattttagtattttgggaggttaaggtaggtagattatttgagtttaaaattagtttggttagtagggtgaatttttatttttagtaaaaatataaaaattagttaggagtggtggtgggtgtttgtaatttgagttatttgggaggttgaggtaggagaattatttgaatttgggaggtggagtttgtagtgagttaggattgttttattgtattttagattgggtgatagagtgagattttgttaaaaaagaaaagaaaagaaagaaattggttaaggtaggaatattgatattataggaataggtaagtgttataaattgggaaattgagtgttgttgtttttgttggttttaggtggttggttgttgattgttaattggtatattattggaggagggaggtttagattgatttgtagagagattagaggtagaaatgtattatggtttggatgttgagggtgagggaaagagaggagttaatagtggtgtttggagatttggtttgagtaattaggtggatggtagtattgttttttaagatgaggggttgtgggaatttgaggggttgtggaaggttttgttattgatggatttagggtttggtagttttgggaggtttattttgtgttaggttatgtagagataagattatttgggttttgtttttgggaagtttttgtttatgaggatatagtttgttatttaatggggtgttttgtttggagttttagtgttgttgggagaaagttttttatttttttttgttttttgagttttttttgtttttttgttagttgagtttttttatggaggttgtgtttggaggggggttatggatatggatgtgtgtgttaaatgttgtttttttgtggattttttttttattttgtttttatgttttgtaagttttatttttttggggtttgatttgtggggtttttttttagatttgtttttttttatttttagaaaggtgtgtaggggttttttatggtttttttttttgtttttatttttttttttttgggatagtgatttgttggatgggtgggttatttatagggtttgtgattgtttagatatttttgttgtatgaagttttgattttaaggtatgatgtagatgggaataaggtatgagttttttttggttgttgtaataattgttgaaattgggtggtttatagtaaggggaatgtgtttttttatagttttggaggttagaagtttgaaattaaggtgttagtagggttagttttttttgaagattttaggggaaaatttttttttgttttttttagtttttggtggttttaggtgttttttggtttgtggttgtattattttggtttttgtttttgtttttataaggtttttttttgtgtttttgtatttttttttttgttttttagaaggatatagtattgaatttagggtttattttattttgagatttttgtttaaattttttttgtagagatttttaaatagaattaggttatatttgaggttttaagtgggtatatttttgttttgggggggattattggtttattgtaggttttgttgtgtattgaagatgtaggtggtttttttggttaggtttgtagttggttttgtttttttttgtgattgtggaagaatgtattttgttggatgtataggtttttatagtttttttgtttttgttaaattttagtttagttttttttttgttgttggtgtgtattttttttgtttagtgttttttttgggattgtgtgtttaggttttgaggttttagaaaaggggggtggagggtttttttattattttgtagtaatgaggttttattaaaattttggagttttagattggatttagtttttagttatgattaaaggatagtttgggatatgattaaagggttagagaaagatgatttaggttgagaaagaggaggttaaggagtaattggattgtttttgaatgtggaaaaggtaattatgatttgaagggtggtgtttagttgttttttattttttttgaggataggaaaaaaaaggaaataaatgatgtataattagagtagttggttagatatgagggtgaattttttggttgggagtatggttaagttttgatttgggttttttgaaagagtttggggaatttttttatttggaggtttttaggtttggttatgtggttttgagtgattatattgaaggggtagtggttggggttggagttggtgggttttgagtatagttatgaaggtatgtgtattttttggttgtttttttgttattgttttttgggtttttattttggtgaggtgtgtattttggtggtgttttttagggaattaaatatgtttgttgtattgtgtgtggagatggagaatgtataattggttgattttgtgttaatttggtggaattttatgttagttttgggaaagaataattgtatgggtgtgtttatatttattaggtgttttttagaaaaatatttgagaataatgttgtggtttaggatggttgttgtgttggatttggtatttttttaggggggttgtgttgttgggttgagttttttaggtattggatttttaaatttttaaatatggtgtggataggtggtttagtaggggttggattatttgataggtttaggtgttggagtttagataagatatattttggtttggtgtggaagatatggggtgttattaatggtagtaatggttgtatttttgaaatttgggtttttaggttgatgagggtgtgtatgtatttgaaatgtttgtggttttgtagtttttatgtttataaatttatttggttgaaaatagtttaaaatatttaaagtatgagggagggagtgtttgttttttttaaaaaggaaggatttgattttatttatttaaaaagttatttaaatttagaatattttttgtaagagattttttgttttttgtttttttagaatggttggagagttttagtatttttgtatatttgggatattttagagggggtggggaggggtaagtgggtagtgagtgattttagatttaggatgagttgttaggtgttttttggttatatatttaagggattggagtgtagttgtagtgttgtggtttgttgttttgggggtgggggtgttgttttatgttgtgaatttttatatggtttttgattttgggtagaggttgagggtttaagggatggggtgatagggagagtatgtaggagtgggtttttggttttttagggtgagtggaagaagtgttttttttttttgtaggtgatagatttggggggttttttttgaggatgagagtttgttgttttttaagttttgtgtttaatttaggtttttaggtttattttagttttttggttttgtttgttttgtggatgatatagtttaagggtagagattgttggtttggagggaaggttaggttttaggttagggtttagaagggagggagaagtttttggggtagttttttttttgtttatttattgtttagtttttttttttatatttttttttggaaatgtttgtttttgataaggtttattttttgtttttaggaggtttttattgtggaggaagggaggtgttgtttgtttttggtttttttgatagttgtgttttatttttgttttgtgtttttttttttggatagtgttttttttagggtttatttaggagggtgtagtggtggtttttggggtggtggttgtggtgggggtgttagttgtaggggtgtttttggtgggtgggagttggtggttttttgttggtgttatgggatttgtatgtttgttttgtgttttttggtttttgagtttataggttgggattttgtttgttagttgtgtgtgttgttgtttaatttttgtaggtgtagagtgtgtggtggtggtgatagagaattttgtttggttgtttaaatatagttttttgtagaaggattttgtgtttggggaaggggaggaatttttttttttttgggtgtttgttttttttgttatggtttggtttttatatttgtttatatttggttgtagtggggtgtttggggggaggggttgaggttgtgttttttgttgttttttgggtgtgggttaggtggggaggaggggggtgttttggttgtgtgtttaggattgttttttagtggttatttgggttttagttttttaggtttggttttgataggtgggtggagtagttagtgtgagatagggaggttggtgtgggtgtgggaatttgatttgtttgggaggtgggggtggggtgggggtgtagtgtgtggggaggggttggtgtttgttttttttttttatttatttagttgagttagggggtttaggggtttttttggtggttagttttgtattgtaggagtgtgggtgtggtgttttagttagtgtgtagggtttgggttttgttgggggtgtttttttgttgttgttttttgtgtgatttgttgtttattagttattatgttggattttgtggttaatgtgtagttggatgggattattttggattttgaaggtgggtgttgggttggttgttgtggttgtggatgtgttggagaggattttgtgggtgggtttggtgtgggatgggggtgtgttgaggggagatgggagtgtgttgaggggagatgggatttttaatttaggtgtttttttgttgagagtgttgtgtgtttttggttttgtgtttgtgttgtttatgtgggggattttgttaggggtatttgtgtagattttgtgtgtttttataggattttgtgtttgttttgtgtattgttgtttgggtttttttttttttattgttgtttgtgtttgttaagtgatagtgatttttttgagggtttgtgaggttgttttggaattttttaggatgtatagttttattttgggaaatttattggttttttttttttggttttttttggtggtttttgggttttgtttggatttggtaatgggatagggaggttgttttttatttttgattgagtggatagttgtgttttgtttgggtggatagttttttttttttttatgttagttttggggttgttaagttgtgtagtttgtgggttgggagtattgaatggatatagtttaggttgtggtagggtttagagtgggatgttttatggtttttatttaggtttggggatatttttatttgttttttagaattgggttgtgggggatagaaggggtttgtgtgtgggtagggagagtattttggtttttttttgtttttggggtttataaagtgtgttgggatttgtggggttgttttgtttaagtttgggtttggtgtttgtgtttttgagtttgtgagtgtgtgtgtttttttgtgtttttttgattgttggtgttggggttttgtgttttgtgtttgtgggagtaaatatagtaggtgaaggggaagtttatataatggtttttagtgttttggggtagggtttttgaggggtgggtttgtttttgttgggatttggagtttttgttttttggagaggtttttaggttgatttgggtagagttttttggtgggttgggagggggaaaggttgtgttgaaatgagtaaattgtttaggtgttaggttaagttgggaggtgattagtttgaggttttttttgttttatggttagaattagggttgatatttgggtgttttgagtttagttgtttatatggtttatttggggttagttttatttgagtgggggaggtggggttttttgggggattagaattttggttggatgttaagtagagtgttagtggttgttttttagggttgggtttgaggagggtgtggggtggtgaagggatgggagggggttgtgatttagtggttattggtgttgtgtagagtgtgagttggaaatattgtagttattttgttagtttagtggtgaaagtttttttttaggttttatttttttgtatttttgttttttagagggaggggaggtttgggtttgtagagttgggagggtttgttgtttttgttttttttttttataatatttttttatttggatatttttgggtatatgtttatattggggtttttttaggtttattgtgttttgttgagttttttgtagtttttgagtgaatgtgatttttttgtttttgtttttttgtaatttttttttgtgattgtttttttaggggttttttttgttttaaatgtttaagtggtatgatttagttggtttgattattttttagtaagtttttatggagagaggttttgtgttgtgtagagttttttttttgtttgtgggattgaggtttttgtttttagtttttaatagaaagtgttgggtttttagtgggatttttggggaagaatttttgtgttttaatgggagttttgtggtgggaggggaggttagggtttggggttgtgtttgttgtatagttgttattatttgtattatgaaagttgttagtgttttttttttgggtttttgggtgtaattttatttttgtttttatgtgtttttatttggagttgtttttgtggttgttttttaagttagttttgtgattttgtaatttagtttaagataatgggtttattgagattattttggtgtagtagttggtaattttttggttttgggggaaggttttttagttttggggagtggggttttaatttgttggttttttgtgtttattagttttttttttgtgtgttttgaatggttttgttgggaattttggttttagagttattaggtggtttgagttgataggtgtgagagagtgtgtgtgtgtatgagtgtgtatgtgtatgggggttgatttggggtatggaaaggtggttttttttggtgtttaaggagtttggagtatagttggagggtgtgggggtgtgtatatgggagttggataattttgggtggatagatagatgtggggaagggatgattgaaggaggtggaggagagagtgtgatttagtttagttaggggtgatgtggataggtagtttttgaattagggtagagaaaagttattattagttagtaggggagaagttagtatggaggaggtggattttgagggagagtaggaattggattgtaagaggaaggagagttttttggttagtagtagttagtagtagtgggggaggttggaatgagttggttggagagggggttggggtataaggaggggtttgtttgtgaagattatatgggttaggttgtggagggttaggtatgtttgttgggagtgtagttggtttatgggaagtatttggagtggttgggaatgggtgtaggagtagtgttgtgggagtataggttttttttttggggtggtttatttggtgttttggtttttgtaaggtaggttgaaagggtggggaggaaattgttagttttttatagtgttgggatggtggttttagggtttttgaggttagtggatgtgggtgtttgttattatgtgggttgttgaggggtggagattttaggggttattttaaagtaggatgagttttgagttatggtatttttgggggtagttttttaattgagtagatgtttaggtttggaattttgtaatagaggttatagggttttgattagggtgttttgggaggtttagaattagtggtagtatatagggtagatggtaagtgatttggtatggggaaagaggtaggtgtttaggttggtatagtatatttgtaaggaataggtagatgggaagttgtttgtgggtttgtgtgtgtgtttggagttaaaattttgttaatgttttatgttttgggtatatttattttttttttggggagtatttttttttttattttttttttttttgtttgttttttttatttagggttttttttattttttttgttttggggattgagggtattatggttttatgttttattattgatgagttgtatagggatttagtttttttgttgtttaggttgggttttttaggtttagggtttttaggaatggagagggtattagtgttttttatggatttaaattttttgtattttgtttttgttttttttttaagataggtttttgagttttaaggttttagggttttgtggaggttgttatgtagtagtaaggagaatgttttgtatttggttgatgagatttttagagttttattttttatttttttattgtataaatgggtttttaggtgattgtagtatttgttattgtttgtaatagggtgataagagggatgattttttttttttttttttttttggttggtggaggtatggggttggtggatggtatgtgtttttgtgaatttaggttaaatttgttattgtaaatatgattataatttgggtttttgtgtaataaaagtttttttaagtattagttgttggtttgttttgtttagtggtgtttgttgtaattagatttgtatattgagaaagaatttaaaagtttttgatgtttgttgaaataatttggtttaggatttatgtgtttagattttagagttgtgtggtatttgagttttttttgagtttttattgttgtttgaggaggatttttagatttgtgttttggaggtagagtaggttgtgggatgggtttttgggtgggaaggattatgtggatatgtttttttgtttgagagttttaatatttttgggatgtgggagttggtgtgttggtaggatttaggtgttttttttttttttagagaaaaaggttttgttgtttggtaataggtgtagatttgtttttaattaatgttagtaggttttttgtgtgatgaattttgttttttagttaagatttaaggtattttgtgaatattgtttttttgtagtttgagtttttgtggtgggaggtaggagttatggggagtgggggtaggttttttatatgggttttatagttattggtagtattgatttgatgttttttgagtttagagtttagggttagatagatttattgttttgattatgagttggtttatttagaggggggtggatatagtatttaggtagtagatgtattgtgattagttttgtagtggggttgtgggttttttgggttggatgtttgggaagaggtaggtggaggtaaatgttaggatatttttgtagtgattgggtgattgtaggttggaaatgttttttgtgggttgtggttgtttaggaaggttttgaatggggttagtggatagagtttgtatttagaggggtagtgttttggaggagtgaggggtatggtagtgtagggatgtttaggttgtttttattttgttattggaaagttgggtggttttggtttttttagtttttttgtttgtttttttgtttgtaaagtggggttagaaatagttttttttgagggttgttgggggattttgagatgtagtttatggtgttgagtatgggttttgttttttatgggtgtggtgggtgttgtggttggtgtggtatttgggtgggaaaagggggtatttgtaaaggataggtaggtttggatgtttaaatatgtagatttggggatgggaggttttaggtaagggtttgtgtgatgttattgtatgaatgaggttggatagtatggttattattaattatggaaagtatggtagatattagtgttagtagtgtttgtttgggggtttttttgagtttgataggtatttaggtttttagtgtagttatgggatttttttttttttgtttggttgatattttggaggttggtgttatgttggttgtaggttttttttattgggaggttgttttggttttttttgttattatttatttttatttttattttggagtgttatagatgggtggattatatgtttatttgtagggttaagtgttgataatgaggtgagtatttgttggatgattggattatgaggatagtgggggtgttggtagtttgtgtttggttttgtaggttggtttttttttgaaaagtggttgtggtagagtgtgtattttagggagtggtgtttgttgttttgaatatttttatttagtaggtttttgtaagggtttagttaagtgtggtgtagagttgggttggtagttggaatagttttattttgtttagtggtgagattaagggttgatgggttaaggttgtgtgttgtttgtttagtttgtggatttatttattgagtatttttatatttttatattgggtttggggtgttaggaggtggaggggggattgggtgtttggaaaaataagtttattgagagtttgagtttttaggggttagtattaggtagttattatggtgtttggtatatagtggttatttggttttgttggttgttttggtggtggagagtgtgtatggtggttgtatgtgatgggtattatttagggtaatatagatatgtagattgtgtatttgtttgtaggagttagggattttttagtttggtaatttgtgatttttgtttatttgttgggagagaggtgttgttttttgatagtttggtgttgggagagtagaattagggttttttttttttttttttattttttattttttatatgtttaggtattaggggaggttatatttagggatgagttttggttattgggtttagggttttattgttgttattttttttttttgttagttagttaaatgtttgtttattattgtgttggggatggggttggtttgtttttttgaagtttttttggtgtatagtttaggttggagttttggatgattttgttatttttttttttgattttttttttttattttgatttattttagaaatttagttaaaaattaagtttttgtgtttttttttgataaagttattgaggaaaaatggttaaatattgtttttttttttaaagtttttttggttttttttaaatttggaggttttgagttgtttatgagattaaagggtttggaattttttggaatatagttttagaagtgggaggatttgttatttttttagttaaatagatttattagttggtttttagatatttttaggtgtttggggtatttttgggtttaggttgtttaatttggtttgtagagttttgaggttttgtttagattgggttagtagatagttttagagattttaagtttgttgttgtttttaaaagttttgttaatgtttagaaatttagagggataagaagatgattttgatgttagttgggattataaatagtgaggtttgtttttttttttatttatgtttgtttttattgtttttgtagttgggtttttaggggattgtttgtggttatgggggaggttgggaatgtggggtttagattttattgggttttttgtatttttttgtttttttttgtttatttttttttttggaaatttttgaatatttttttatagtttttggtattttgttatttttggtatttttgggttaattgggaaagttattatttgtttaatatttagaaaattaaggggtttggttttaaatatattgtagtgtttttttttttatatggtattgaattttttgtgtttttaaagttaggagtttgtgttttggatgtgggtgatggagttttgtagatatttggagtggtttttttgggagagttttttttgtttttttatttatttgtttttttttttttgttttaagttttggttatagttttggaggggttatttgagtgtaggttgtttttaggtgtatagttggaggggggtagttattttatatttttttgtttgttaggggtatttttagggatttaggttttgagggatagtggaagggtggggtggggagtaggttgttgttttgtgttatttgggtgttatgtagattttgaatgggtagtttttgggagttggttttttttttttattttttttatagtgttgtttttttgaggggttggagttttttggagttttttgtagtttgtggtaggtttttttgattttgtgtttggttttgtagtttttaatttatagttagtggtatgaagaatatttttggttgtttttatttgtggtttttgtaggtagtagttttttggggtagggtttgggggttttggtatttttttgtgggattttttgggtatgagggagggagttatttgggttatagatagattttttttttgtatttaggaggtttaggatggatttgttttatttttttttttggtgggaagagagtatttttggttatggggaatgtggtttggatagagttatttagtttttttttttttttaggtagggttttgaaagatggagatggttttgtttttgttaggttaatagttagtagtttggtggatttttatgtagtttaggtaggatttttttttgtttttattttttattttatgtgtaggaagttggttttaagtagggatttttggttttgttttttatgtgggtgggtagtttttttgtgaggggtaggttaggtttttgttttatgttttttagagattgatgttatttatagtaagagtatataagtttttttggttttaaattaggtttggaggggtggtttttttttttgttttttgttttttgttttttattaaaggttagggaatggagtgttttgtatgtttgttggggttgggtttttttttttggtttaaaatgaagggttggaatttttggtgtagattgtatggtgagaggtgttttttgggatttatttgaggagtattattgttgaatgttttgttaggttaggagtattgttgggggtgggagaggtagttggtttatttgtttatttaatagttatttatgggtattttaagggttagttttgttttaggtattgggggtttaggtatgggtttaggagaaggggtagaatgggagggttttttggaggaaggttttttaattagagattggggtaggagtttgttaggtaggtgatgttggttagttttttttgttattttttttttttttttttttttttttttttttttttttttttgagatagagttttgtttttgttgtttaggttgtagtgtagtggtgtgattttggtttattgtattttttgttttttgggtttaagtgatttttttgttttagttttttgagtagttgagattttaggtatgtattattatgtttagttaattttttgtatttttagtagagataaggttttattttgttggttaggttggttttaaattttttattttaggtgatttgtttattttggttttttaaagtgttgggattataggtgtgagttattgtgtttggtttttttttgttatttttgtagatttatagtgtgtgtggaagattgtatgtttgtgtttggtatagttgtttttggtatttaggtgggaggtgggggagagggttgttggtgttagtataggttatggtatgagataggtttttgtagttaagtggggtgtattgtagtattggaggggttttgttgtgtatgagatttaggttttgtatttgtttttttttttaggaggtttggagggttgggagggattagggtggtgaaataatttaggtgggagagaggtattgttggagaggtagagggagttgtaggtttgtagtagtgagttttaaattttgggtttttattagaaaattttagaaagggttgttttgtttttttttttaaattataaaagaaatttttggttgtttgggttttttggggttgggtgggggaggagattttttatttgtatttttgtaggtttagtattgtgtagagggaggagggtggaggtaaaggtgagggaggagggtggaagtaaaggtggggtttttttttagttttgttgttttgtttggttgttgtttttagatttttatttttggtttggaaatatggaattttgggatagttggggtagggggtatagaatggagattttggtgagggaggaattttttttttagttttggttgtggttatagtaaggttaggttgggaggattttatttaaatatttatattttttttaatatttaaatgatgaagtaggtttttgtatatagttgttttggagttagttgttgtttgttttatttttttttttttttttttttttttttttttttttttttttttttttttttttttttttttttttttttttttttgtattttttgtttttgatttaagtttaggtttttttagttgttttttttttatttataggtattttttgtgattgagtttttttttgttattttttataattattttttttaattgagtattttttaggtgttaggttttgggttggtattttgtatataaggtgttttttaatttttatgagagtttaataaggtagattgggttgttgaggttttagtgttggaaggttggtttgggtttttttagtttgtatttgtatttatttattatttttttattgtggagatttgttttttggtttttggttgagtatgatggaaatttttgtttattagtttttggagagtggggatggttgagggttttgattttggggtttgatgggggttgtttttgttttattttagtttggttgtttttttatttaatgattgagtttgtaaaattagaataatagtgttatttggttggtattttgggtggttgggaggtgtgggagagggtgtatggaggggttgagtgaggtgttagtattgtggggatttttgagggtagtttttttaggtttagggtggagtgtaggtagagggtgtgatggtttagtgtgttggtttatatttggttttgtttttgtttatatggtaatgtgggggagttattagttttttagtgttttagttttttatttgtgtaatggggataagagtaaattattgtttttaggtatggtaagtatttatatatattgattattgtagaatgaatatagtgagttttttttaggtttttattatatgttaggtagggtgttaggttttagtggagaggggataatgatgggtaagttggtttttgtttttaagggttgttgagtagggaggaaggtggtggttgttttgattgtgatttggagtggggtgatttgtaaagaggttggtgggaggttggttgggggttggttgggggttgtttttttttttgtttgtgttttgtggtagggtattaaattggttttttttatggatttttgaggttttgattgtgggattttgggtaggttttgggattttgtgattttgtttttgtttgttatttaggtttttgtttttagtagtgtttagtatatggtgatttttgtatgttttttagtgtgtgattgattttggagttgagatttggtagttgaggttggatattgtttttggataatttttggggaggtgggggtagggtggggttgtgagttggtaattttgagtttttagtagtttttgaatggaggttttttttttgtaggatttttggggaggaaggaggggatgggggagatgaggtttgtgagtttttaggagggtagaggtttatatttgtagtgttttagaaatattttggggtgtttaggtttatttagtttttttgagttagaattattaagagttggggattagtagtttattttttagtaagatttagaaatgatttttttgaatagtttgagttaagaatgatatatttggaattagaatattagaattatagaggaattgagagaatgggtttaaaatgtgtagggattttagttatatggtgttatatggaggaaagtatttaatattattattgtatgaatttgtttaaatatatatatatatatatatatatatatatatatatatatatatattttttagtaaagagtggaaagatatttgttagaatattgatggaagttatttgggttgtgggtttatagattttttttttttgtttttgtgtattttgtaaatttttggttttgtgtttaaattttttttatagttaggaataaagtaatagatgttattttttaaagtttatgggtttgtgtttgtaattttaatattttgggaggttgaggtaggaggattttttaagtttaggagtttgagattagtttgggtaatatagggagatttttatttttttttttttttttttttgatagagttttattgtgttttaggttgaagtggtggtggtatgtttttggtttattgtaatttttgttttttaggtttaggtgatttttatgttttagttttttgagtagttggattatagatatttatatttgtaggatttgagaattttataagaggaaagtttttatttggaggttgttggggatttggagttgttagtttatatattttttagtagagatagggttttattatgttgattaggttggttttaaatttttgtttttaagtgatttatttattttggttttttaaggttttaggattataggtgtgagttattgtgtttggttatgggagatttttttttaaaataagaataaaaataaaaataaataaaagtttattgttaaaaagaaaaatatattatttaatttaatttttttttaggattgagagatgaggaagtagaggttggaaagtgttatattttttggttgttggtagttaggggatttgaggtttgggttggtttttttgtgttttaggtttggggtgttaggtggagtttttgttttgtttaaaggtttaggtgtttttgttagtattgtttgtttttgtatttttggttataaggaatgtgggttaaaggtagggtttttgatttttgtttaggagggtgaagtgggttggttttttttgtttttgttttaaggtttttgtggttgtgtttttggaaattgttggtttgagttagtgtgtggagttgggatagattttattgtggtttttgtggggttattttatgtttgggttggaagggattttttggtttagttttttttgttttttattaggaaattgagattagagaggttatttgtttggtttggggtggggtgtagatggtgtttgtgatttttgtatgttatgtgtagatagttttttagttgtgggttttttatgtaagtagttatgttggggataatttggttgaaatttgtgatttaatgaagagaagaatgattttttttgtagttttgtgttttataggtttttttttgtttttattttttttgtagaggggttttatgttggtgggtgggtttttgttgttgtaatgggtttaggtagtttttgggtagtggaggtttggttgtttttttgtttaatgttttttgtagtttatgttgtttgggaagggtggggaagtatttagttattggggattttataagatgggtatttgggagatgttgattggtaggttaggtttttgtggtttataggtaggttagaggttatagtgttgagttgggttgagttggtagtttagggtagtgggggtgggggtattttgtttagttatgggtttttttggtataagggtttggagtttattgtaaataatttttttagttttttttttttttataggttattagtagaattgaggggttttttgttgatgaggtgtggtttgggaggggttagttgtttgtttatttgatttttgtggataggtgattataggttttttgttttagggggttgggggaaagattggggaggtttttttggtttttttatttggaaggaaaatatgggtataggggagatattttatagggatatattttagttagtattttttggttgtgttgggggtatagtgtttgttttgtttataagaggggttagttttttttaggatttaattttagtttttagtgtagggtagatgagtatttagaggtttagaggatttatattatgagagagaagttgtgattatataggtattgaaggttaagtagaagagtgggatatatgggtgatttgaaagttttagggttagtgtggttagttttagatagttggggagttttgggtattaggtttagtaggggaggagggtttttgtgatagtttgttggggttgttgtaataaagttttatgaattttgggggttgaagatggttttagaggttagaagtttaaaattaaggtgttgattaggttgattttttggggtttttgtgggaggttttggtttaggttttttttttagtttttggtggtttttgggtgtttttgggtatgtagatgtgttatgttattttttgttttgtttttatatggttttttttttgtgtttttgtgttttgtaaggatgtttgttattgtatttagagtttattttaaatttaggatattttttttttgagattttttattgtatttgtaaagattttattttaatttttgttatatttataggtttgagggttagggttttggtatgttttttgggggttattatttagtttattgtggtagttgattttaggggaagtagaatgttttaagtttggggtgagtggagggaatgttgttgggtggggagtgggagattaggtttggagatattgtggattttttttgtttgatgagggtgtgatgaggtttttattttaggttttttgaatggtggttgtttttgaggagatttttttttttggatttgtttttttagaaatttttatttaggtttaggttttaaggtggatggtaagaggtggttgtttttgttatatttgatgggtgagtgtgtgaatggggttgggagtaggatatttgttatttttgtggatagattttagaggtttatgaatttgttgttggggaaggtgtttgatttagtttgattttttatttttatttttttttttttgtttttttttattagttttgtttttagagttttatttttttaaaggtaggtgttgttttttggattttttagtagttattttttattttagattttttttttgtaggtttttttggttttagtgtttatttttttttgggtttttgtttttttattgtgaggtttttgggtagaagtgtggggtttttttgttgtgtttggtttttgtggtatattaggggtttttttaggggtttgttttgtttgttaggtttttagggagttttttaagtttttagatgggtttgatggagttttttaatgtgttgttttagagtaggaggggttttggttgagtttgagagtttttttagttatattttgggttgtttggggtagttaggtagtttgttttttggaggtgttgtttttttttggttattttttttggaattttttgtgtttagttgtggttttttttatatagtatatttattatttttttttatttgtgatttttttttgttaatttttttatgtttttgagaatggagattaggttttttttattttggagtttagtagaatttaaattaggtagatttgtgtaggtttatgtgggggttttgtggttattgtggttttgttgttatttttagtttagtttggtgtgttttggattatgttatttagtgttggttttttaaattttttttttggttttgtaggtttgggaagtagttggtttttgggtgtagttgtgattggagtttgaattttgttttttggggttattgttttttgtaattaggttgtagtttatattggtttgggtagaggttattggttgtttgttttggggttataatatagagagttttgtgattaatggaggttttatttgggttaagtggtttttggtgttaggtgtttttttttttttttttttttttttgtattttttaagtgtttgtaatattttttttaatggataatgagatgaggagggagggaggggtggtttttttgtttaggtagattaggaatggttattgtttgtgtgtgtagtgataggtttgggaatagataagggagagtttgtttgggaggttggatttttatattgatgttgtttgtgtttggtagttttgttttgggttttagaatagatattgattaatatgttttttagggtttttaggtttgggttttggtttttggtagagttttttatttatgggaagaagtattgagtagttttgttggttttttgtagggagttgggatgtatttttaagagtagtatgtgtgaagtttggggtttgggtaaaggagtgtttggggaagagtttgttgttgttggagggttggaagtagaggggaaggaggggtatgtggtaggttgaggaggtggttggtgattttgtggtggggatgagggggttatgagtagattaggagttagtattatgtttttttgtttttagaattgaggatggagagttgttagagaggttttggtggggtgtttggggttatttaaagggtgtgggtggattaaagttgaggaaagttttattttgggggattttgtatttaatttttgaggtttttagagttgtagtttgtggttttttgaagttaattattttttagggttttgtttttgtttttagtgatagttatttattagggagtttttgatttaaggagatttgaaaggttatttggttttttttttatttttaggtaggttatatttagatttttttatatagatttgttttatttttttgttgttttttattagggatggagggtgggtggtttttttatttaggttttggtggttttattttagttaggaaattttttttttttatttgttttatatttttttttttgtggtttttgtttatttttttttaatttgtttttagtggagtagttagtagttggtttagaatttgggggtggggggagtgttagattagtgtagtatatttgagagtgtgttagaggtgtttttatttttatagttgatttagtaaagaaaagaggaagtttagtaatttagtgttattttaaagtttgtttggaatgattttgtggttgttggaattaggggtatgtggtagatgatgggagtaggtatagagaggtttttgttttggattagttgttgttgtttttttggaggttgggttgttttttaagaagaggatttaaggttttgtgagtggtggttttttttggagtttttattgtggttttggttttgttttgtgtaaagagagatggtttgaagtagaagttgttatgtggttgttttaggtaggtgtttgtagttttagttatttgggaggtggaggtaggagaatggtatgaatttgggaggtggagtttgtagtgagtagagatggtattattgtattgtagtttgggtgatagagtaagattttgttttaaaaaaaaaaaaaaaaaaaaggagtagagaaattttttttagaaggtttgtagttattttttttttatgttttagaggtaaaaaaaaaaaaaattgtatattttgttttttttttttttttttgagatggagttttgttttgttgtttaggttggagtgtagtggtgtgattttggtttgttgtaagttttgttttttgggtttatgttatttttttgttttagttttttgagtagttgggattataggtgtttgttattatgtttggttaattttttgtgtttttagtagagatggggttttattgtgttagttaggatggttttgattttttgattttgtgatttgtttgtttttgttttttaaagtgttgggattataggtgtgagttgttgtgtttggttatatgtttttgtttttgaataggtggttttttgattttgggtgtggttattttaagattttgttttggtggggtataattttggttttaggtagggtgattgtataatttattgttttttgggggatatgttagtgaaagggatttttgaatgattatggtgggataatagatgtgagttgggtttgttttaggaaggttggatgtatgggttttttgagttagaggagataatagtagaaagttttgtggttgatgggattgagtaggagaagggttggtggaggttggggtaataatgtatttgtttattgtgaagggtttgtgtgagttgatggttgatgagagggtagtggggtgaggttgttttttgttaggttagattagttttaggatatttatattttttttttagaattggtgatttagtggttagaaggggttttagaattgatgggatattgagggagttgaatggaatggttggagtggttatagtaggttttaggtttttttttgttttttttttgtgttttgtttttggggtttatattttggggttgttgtaatagagtgttataatttgggggtttataaatatagtttttggtggtttttggagatttttggtgttttttggtttgtagatgtattattattatttttgatttttggtttttgtttttatgtggttttttttttttgtttgtgtgtttttttttttttttgttttttataaagatgtttattattggatttagggtttattaaatttagaatgattttattttgagatttttattttaattatatttgtaaagatttgttttttaaatgtgattatgtttgtaggttttaggagttaggatttaagatatattgttttgggggatattgttgaatttattatatttaataaatttagagttggtgttaatgttttttgtggatattatagtagattttggaggttttttgtaaaggaatttgtaggatttttttttttttttggagggatgagattgtagttgggttggggaaagttgttggtttaagttggggttggtttagttggtgttggtttgttaggttgttagagagttttatttagggagaaattaatattataaagttgggggataagagaaggtttggaattttaagggttggttgttgaggttagttgtttatttttttgtgttttattttatagggatttaggtttgttagtgttttgtttttggaaggaatgttgtgggttgttgtgttttataggtagggtggagggtttttttgtagttagtgagttgttttttttgtagtgtgtagagggaaggaggaggtttgtttattttttttggttttagttgaaaatttaattataggttttggtattaggtagatttgtttatttttatattattattgtagagtgagttaggttttttgggtggggttgtgatgagtaggaaggatttttggagtgtttgggattttttgggtttagggttgttagaggtagagagaaagaagtttttttttaatatttgagtaaagatagttattagaatttattagagtggttttttgtggtttttttttgggtgttgatttttttggtgtatttgaagtttttagggatattattgatgttttttgtatttttatttaggggttagtggaaatggttttttttttttttgtttagaggtattgtggatgatgattttaggttttagattttagttattgggttatgtgtgtagataagtttgggtagttagtaatttttggttattaagttggttttttgtggattgggttggtattggaggtgggttttagttgttagtattgtggtttagttaggtttggttttgggaaggtagagggggaggggattgggaaagggattgagttgggggtggggtggtattttggttttttttttttagatttttggtaggtttgaattatttggttgtggttttttaaggagggagtgttttttttgttttgatgtggattttgttttttgtttatgttgtttttgtttttaaataaatgtggttttttgtggggagtttgggggttgttttttattgatattgttgttttttggtttttttttgtaggttttgtttagttttattgtgtttatttttaagtttttttttttggatggttttgttttttgagaatatatttttttttattattttaattgtgtttttttttttatttggagtttgttttatttgttttaggagttattttttttttttattaagtagtttaggttaattttggagggttaatttgtgtttttttagaagtaggttttgagatagggattttagtgggaggggatattaggggatgtttgagtgtgggaatgggttaggtagggaatttagttaataaagggtgttttattagtttattgtgattataggtggttgtttagtttttatattgggtagtatggggagattgtagattgtgtttttagttttgttttatttggggttgggtaagggagttggggtttttatattttagtttttggttaaggattgtattgtttattttttttagttttttgagggtttgggtattaggaaaggttttgggtggagatatggaaataggttatgtgaagttagtgggtgtgattggtagtagtaaggttaggatagttttggttattagtaaggtgattatatattttagtatgtatagtttttatagatatatatttaggagatggtaattatattagtaatagttatttttgttgtgtgttatgtttgtatttagggaattttattttttatttatttatttatttttatttgagatggagttgtgtttttgttgtttaggatagagtgtaatggtataattttggtttattataatttttgttttttgggtttaagttattttgttttagttttttgagtagttgggattataggtatgtattattatgtttgattatttttgtatttttagtagagatggggtttttttattttggttaggttggttttgaatttttgattttaggtgatttatttattttagttttttaaagtgttaggattataggtatgagttattgtgtttggttttaggggtattttattattttattattttttatagtaggtgatattgaggatattgaggtttagagtagattgtggttatgttatttttttgtttggtttttttgtttttagttttgaaataaagagtatggtttttgtgtaggtttatatgttttgtttttagttttggagtagtttttaagttttttgaaggtatattaggtttttgggttttgttttttaagttttggataaataggaggtgaaggagtttttgtaattggattttattttgttagtgttaaggttttgtttgattatttattttattttatatagattagggatttgtgttaaggtttagtgttataggagagtgaagataaggaggtgtttatggtgtatatgttgttggatttattttgtagattttaagggttatggggagttatttgttaggtgaggtttttttgtggtttttttttgtaggtttagggtagtatatagggaggtgtttttttattttttggtattatttgtttggtttttttgagttttgattttggtttttagatagttagtgtttttttagggatagaatttgttttgttgttgtttagaggagatttagtttgattagggttagtgtttttggaatttgagtttggaattttattttgttttgggtagaggttatgttgtttttttttatgagagttgagttgtgtatgagattattttgattttgggttttattatttttttgtatgatatttgttttaggttggagtagggttttgtggtttgtttggtgttttttttttagattgaggtttgatatgtatattaggaagtgtttgatttggttttaggagttgggagtggtttgttaggtagtttgtggttagagtaggggttttaataatggttttttgtgtggtatatttttttttaaataggtttaggtttaggttgtttttgttttgattttgttatgggtttggaggggaaagtttgtatttggagggtggtttattgtggtttttttttgtgtagtagttgagattgtaggtgtttgagaataggagaagttttgtgtttattttgggttgtgagatgtttttttagaggtggggatggggatgggttagtatgtagttatttatattttttagtttgttggtattaaggtttgtgtatgtgtgtgtttttttttttttaattttgtttttttaatatggagttttgttatttgtttaggttggttttggatttttggtttaagtgattttttagttttaggtttttaaagtgttgggattataggtgtgagttattatgtttagttagtattaaggtgtgttttttaagagtaatattggttgggtgtagtggtttatgtttgtaattgtagtattttgggaggttgaggtaggtggattatgaggttagtagattgagattattttggttaatatggtgaaattgtgtttttattaaaaatataaaaaaattagttagatgtggtggttgggtatttgtagttttagttatttgggaggttgaggtaggagaatggtgtgaatttgggaggtggagtttgtggtgagttgagattgtgttattgtattttagtttgggtgatagagtgagattgttttaaaaaaaaaaaaaaaaaagaataatattgatggttttattttttgaatatgttaagtgatttttatgtagtataagtattttagaaggtaggaaaatgtaatgaataatatttattgttatttattttatttagagattgttattttttgtttgggtgtgagtgtgtgtgtgtgtgtaaattgtatatgtgtgtatgaaatggaattaggatttttgtatatattttgtgttttgttatttttatttaatatttttggtattttttatttttaaaaatgtgattttaatgatggtgtaggtttttgatatatgggtttagaaaatttgtggaaatttggattgtttttaggttttgttagtttaatgttgatgtaaatgtttttgtatgtaaatttttttgtatttttgattatttttttgggataaatttttagaagtgggttaaagtatatgaatggtttttaggtttttggagtaagttgagattggtggggattggagaagggatttagggaggtttttgggagtttgtgagattggagtttggttttaggggatttgaatttatagatgaaggagatggttggtaaaggtgggaattttttgttttatgggtgggggggtgatattgttttattttttagtgatagtatggggatttttttaatatgatttggttttgtatttttttgatattgtgtatggtttatagttgtgatgtttagttgggagttttttttgtgttttttagttgtattaattttttgtagatagaggaggaagttgtttggtgtttttttttgttgtgtgggttttttgaatttgtttagttgggtttgtggatttgtgtagttatgtatggggttttaaaatttgtaaaatgataagtttatgaatatttttgtttttgtgggtgaatgtggatattttttggttgtgtttttttttatagggaagatggagatgtgtaaagtgataaggatttgttatttttgggtaggttatgttggttttattgtgaggatggtggtagggggttttttaggaggtttgtatattgggaagagaggggtgattgtgtgtgattgtaggatttagggtgtagttttaggattttgatgggggaggagatgttggggagttttgttttgttagtttggtgatagatattttttaatgttttttggttgggtataatttataatgttttttgtggggaggtaattgtttatgaggtatttttggtagggatgattttgttttattgttatatattttagtaatgaaataagaatttagagtgatgtgatttttttgatgatttttttaattatttggggtttttgtgtgattttaagaagggggaaggaggtagtttttgtttttttgggtttttgatgtggtagttttggaatggttatgtgtttgttggtttatagtgggttatttgttgaatgtggttgtggtgggattggggttgggttggagagtgggtgattatattagttagttttattttgggttattgtgtagttaggggttttatttttttaggggttttgttgtgagtgttttggggttgttggaataaattattggaaattaagtggtttaataaagattgatttgtttatggttttggaggttataagtttgatattaaggtattggtaggattatattttttttgatagtttgaggggaggatttttttttgttttttttagtttgtgttggtttaggtgttttttggttttggtagtatttgtagtttttgtttttattatgtagttttttttattgtgtttttttgtgttttaagtttttttttgttttttttttataaggatattgagtattggatttagagtttattttaaatttaggatagttttattttgggatttttaattatatttgtaaagattttttttttaaataaggttatatttgtgggtttttggggttaggtattagatatgtttttttgggggttattagttaattttttatagaattttagatgaaagtgaatttttataggttgaaatgggggtgaaggtttagtgtgttttttttttttgggagtttttttagggtttgtgtttattttgtgattttgtgatttagttttttttttgagatgaagttttgttttgttgtttaggttggagtattgtggtatgatttgggtttattgtaatttttgttttttgaatttaagtgatttttttgttttagttttttaagtagttgggattataggtgtttatttttatgtttagttaattttttgtgtttttagtagagatagggttttattatgttggttaggttggttttgaatttttgattttaggtgatttgtttgttttgggtttgttttggttttttaaagtgttgggattataggtatgagttattatgtttggtatttagtaggttttggttgttttttttttttgagatagagttttattttgttatttaggttggagtgtagtggtgtgattatggtttattgtagttttgattttttggttttaagtgatttttttattttagttttttgagtagttgggattataggtatatgttattatttttggttaatttttgtattgtttagtggagttggggttttgttatgttgtttaggtttgttttgaatttttgggtttaagtgatttgtttattttggttttttaaagtgttggggttataggtgtgagttattatgtttggtttagtaggttttttagaagtgtttgaggtttggtgaaggtatggtgttatggagtagagaatatttaattttgtttttggggagttggaatatattttttgtagttaattttaatagttatgatgtggttaggatgatatggggagggggtggtgtggattgtgtgggaggttagttttttgggaagggggttggagtgggtttggttttgaggaggatttttaagaggaggaggaggtggtggtatgtttgtttggggggatggtgtgagttagggtgggtatttttttatttaggtgttatttttttgatattttagttgggatatggtttttttggggaagatggatatttttagagtggggtattttttggggaagatggatatttttggaatggggtgttttttgtttttattgtttttttagtatatagttgtatttttttgtagttttggaggttgtgagattttttggttgttatttagaataaatttgtttttgagtagtgttgttttgatggtggggtggtttttgtgggtggaatagtttttgttgttttagagtttattgagagttagtgggtatgggagtggtgttggattgaaatatttagagggattatagagttaggtagtaagtatagaggttagttagtggggagggagggatttatttatgaaaagatattaagtattgaaagagaggagaggatggttggggattggtatatatgtgtattttgtgtagatggttaaggtggtgaggtgttagttatgtagataattggaggaaggaggagtgttttaggggaggggttagttttggttttagaatgatttgtttgtgtatgtgggtttggttggaataaattattgtatttgtattgtagatttaattgtaagtttatattagggtagtttttgttttggtgtagtgtttttgattatgagttggttatggtgggggtgattttaaggggatttttaaggagggggtttattggattttttagggaaggttatttgtttttttgggttggatttgggataaggtttttttttgtttagtttttgttttttaatttgattgtatggaaggatgttgaggatatttggaagttggtttttgttttatagtatttataggatagaggtatattatgtggggatagtttggatagtgtttaggaggtagggagtagattagaggattgtgggaggttttgggaattgtatgaggatttaggtattgagttttgtattttttggtattagtttgatgtatagtttggttttgtgtttattttgtattttattttttttatttgtatgggggtggtaataatattttttatagtttaggtttaagtgggtgtagatgtgatgagtttggtaagtttattttattatatttagttttgggtattgaattttggattttttggttggtagaagtggatatttaatttttttttggggttttggggtttttgtagaattagaatatagttagtagtttgtatgtagggtgtagagggatagagggatattatgttgggagtttatatttggtatatttttgattttggggtttagtgttttgttgttttgtggttatgtgattagttagaggttatggttggatttataggtgaatatagtttgtggatttgattttgtttggttttgtggtgttttattttatttttagttttagtttgtggagatagagttttgttttgttagttaggttgagtgtagtgatatgattttagttttgtaatttttgttttttgggtttaagtgatttttttgttttagttttttgagtagttgggattataggtgagtgttattatgtttagttaattttttatttttagtaaagatggggttttattatattagttaggttgtttagtgttttaaaaagggtttgttttgttttgtgttagtatttaaagattaggagatattatataaagatttagatttttatttttttgagaagtgaatagttttggttatgttgggtttatattttttagggtagtgatggagttgagatagggtttgtgataattgagagttttttggagtttatatggttttttgtttagtttttggtggaggttgagtttagtgatttaggattttgtttgtgtttattaagaaggagaggtgtttgtggtttagagagggtgtttataggagtgttttgtttaggaagttggtagttgaggtggttagggttagggggttgggttttttttttttttttttagtgtttgagtgtatttggaggaagagagatgggtgaggggaaggtattgaaattggttttggagtgttattattgggggttggggattagttgttatttttttttttgtgggtaggggaggtagtggtgggattttatgagatttggattttgtggtttggtgaggtagggagtggttggggagatattgtgggtttttataggggtgtgttgtgggtttggtttggggaaggagttggtgaatgtgtttgttatgtgggtttttttttgttttggttttgataattaggagtggttggtttttatttggagtgtggttgtggggattgtggaggtggtagttttttaggtattatttttattgtttttgagggagtagattttggtggagaggtaggatggttgtagggtgggagttggtggttggtattattgtatgggtttgtagtagtggatgggaagatgtaggagaggttgatgattgagaaagttggtttttgtggattaagttgggggagttggataattaagtggttagaattttgggttttggtattagtttgatgtatagtttggttttgtgtttattttgtgttttattttttttatttgtattgggggtattggtattttttatattttagggttaagtggttgtagatgtgatgagtttggtaggtttggtgttttgttggtattgaaagttttagtgtttgtttttagtgttattgatggggttttgtttttgttgtggttttgattggttatagttgtggttatttattattggaggtatgttttttgttgtggttgatggtagaggtgtgtttgttggtggtgttttagtgtgtgttttggttggaggtgaggagggataaaaatagttgtgataagaaggaaattaaggttgggtatggtggtgtatgtttgtaattttagtattttgggaggttgaggtgggtggattgtttgaggttaggagtttgagattagattgattaatatggtgaaattttatttttattaaaaatataaaaattagttaggtatggtggtttgtgtttataattttagttattggggaggttgaggtaggagaattgtttgaatttgggaggtgttgttgtattttagttagggtaatagagtaagattttattttaaaaaaaaaaagaaggaaataaaagttttttttggaattagaatgtttttatgtagatgtagttggagggggaggttgtgtggtttgtgttgtggttatggtaagatatgatgggtagtatttttttattttagtttgtatttttgttttagaatttatgatggtttttttaggatggggttgttttttttgtttgttgagatatgaaggatgggaagagatttttggtttttattgttgtattgtttgtttttttttgttgttttttagtaggaaatatgttggagtgttttttagttatttatttattaattgtattttttttttttattttttagttttgaaaagattttttgaggttgaggaggttgagatatttaattttattttattttggagggtttagatttttttattttgagttattgtggttagttttatttagaaattttaggatttgggtgtgaagaatttagaatttttggtttgttatgtggattttttaagttaatgtttttttaaggtgtttttgtggagggtggagtttttgggttttaaggtggttgagttggtgttttggtgtattgagttgtttattgatattttgtttaagtaggtggagaatgttggggttattggtttgttttggtttgggtttaagagggttgaggtgttgggttataagatgttagaattggttttttggaggatggagattattattgttaaattttaggagttagtttattggaggatggagttttttgtttttaaggtttttgaggtgtttattgtttttgttattgatgtagtttttaagagggtggagatttagatgtttaagtttgttgaggtgtttattgtttttagtttagtttagattttggagaatttagagtttgtttttgtgttttagttgtagagtaggttggagtttaagttttagttttttgtggttgaggttatattttggagttaggagggtgagttgtagagtgttaggttttggatgttgtggtaatggggggtttggttgttggttttgttatagaattttggaggaagaagttggatatggggtggagggtgttattttggagatttagaaagattggaatgtatgggggtgggggtttgtaagtttaggagaggtggttttttttgtttgatgggaatatgttaagatgttttaagtgggatttgaatgagagtttggaaagattttttgggttttaaggagttttttttatgggttattgtgggttttgttgggatttttgtttgttgtgtgtttttggagggtttgggaggtttagagaatgaggagttatgtaggaattagggtaggtttatgtaggggtgtaggatagggtggagttgagatttttagaagggttgttatattttggtggtttttgtttgaggaattgtaggttgtttggatatgtttagtagaggttgagggtttggggaagggaggagggatgtatgttttttgaggtttgtattggagtttatggtttggttttttttttttaggagggatggttgtggtagagggaggggaatatgaggagtattttagtttgtaggataaaatttttagggtattgggaaggggtgtttggattagggggttgtgtgatagttgtatatggttttatttgggggtgtttttttggtgagaggagagaggttatggggttttagtagtgttttgggagggtttaagtttatagttgtgttgatatggagtttataggtaggggattggtgttagttttgtgggatatagggtttgtttggaaatgttaggttgtgggatatggttgggtttttttttagaagtgtgttttttggttttagtagggattgtggttttatggggttatagtaaggtgttagttgggttagaagttttttaagagttaggtttgattttgggtataggattagaatttagtaatgtttagtaagttttttttaggttggataaatagtatagtttgggtttttgatttagttgttgttttttatttttaattgtggtgaaatatataatatataatgtgtaattttagttattttgtagtgtatgttttagtggtatttagtatatttatggtgttgtgtagttgttattgttgtttatttttggtattttttttatttttttaaattgagttttgtttttgttagattaagttttttatgttttttttttagttgttggtagttattattttattttttgtttttattatgaatttatttgattattttaggaattttgtgtgtgtggaaaaatataataattgtttattttgtgtttggtttattttatttagtatgatgttttaaaggtttatttgttgtgttgtagtatggggtagaatttttttttttttagaggttgaataatattttgttgtgtgatgtatttgtgttgtgtagttgtttttttattggtggatttttgggttgtttttatatttttttaagtttttttttttattttttttgatttttttttgatttttttgagatagggttttgttttgttttttaggttggtgtgtagtggtgtgattattgtttattgtaatttttgttttttgggtttaagtgattttttagttttagttttttaagtatttaggattataggttgtgtgttattatgtttggttaatttttaaattttttttgtagagataggtttttattaggttgtttaggttggttttaaatttttgggtttaaatgagttttttgttttggttttttaaagtgttgggattataggtatgagttatttaatttttttttggtttttttttttgaatgagagttttttagtggttagtgggtttgggggttgggaggatgtggggtttggagagggtgtgggtttggggggagattagtgttttttatgtttttatgggtatgtggagtgtatatttgttttggtgggtttggggtttgggattttgtattttttatagagggggtattggaatatattgagtagttagaggttagtgggttttggaaggttttttttggtttttagtgtgtgagttttgtgtttttttttttatttttttaagtttgattttgaagagttattttgttttagttatttagatttagtgatagtggttgttggtggtatggtgttaggttaaaggtatgggtagtttgtagagtggtaggaggttgtttttttttttgttttttgttggtgtaggatttttgtttgatgtgttggatatatttttattttgggttgatgtgtttatatttagttgagttaaataggatgtggttggggaggtggttgttattgagttatttaaattttggtgatggttggtgttggatgtatagggatgtggttttggttttgggggataggtagggggatgtttatggggatgtataagaatatttttttttaggggtagatatagtttagtttttaaattgtgttagagattgtgttgggagttaggtttagggatataatttgtgggttttgttttttggagtttattgagttgtgagtaggatggttgggatataaggagtgtttagggagtttttttagtagtggaagtataattttattaggttaggaaggggagagaaaggtaggttatgtggaggtagtagtgtttagagttgttaggaatttggtgttttggggggatggtggttttttttatggaataggatgtatatgttggagttggggtatgggagaaaattattagtattttagatttggttatttatggatagggatttgtgtaggtgggagtttagtttatgtggagaggtttgtgggttgggttgatagttttgagggtttaagtaagtttaggtggaggaaatgtagggatagatgagggtagggtttttttaatggaggagtgtttttgaaatttgatgggagtggttttttggggggtttaggtttgagttttattagttttttttttgaggtattatttgtttgtttttttgttttttttttttgtgttatgattgttttggatatggatttagttttttttaatttagttttttgtttattttttttttaggtttatttttttttgtttttttatgtggggttgggttgggagttttttgagttttgatatgtatagttttgattaatttttgtggtttttttgttttttgagtattagggatttagttggtattatggggaaaggaattatggagggagttttgtgttttttgagtagatgtttagttttttggtttttgtttgtgggagggtatttgtgttgtggtttgtttttattttagagttgtgggtgtagggtagggttttttggggttttagttgaattgtttttagattgatttttttaaagtatagtattgttgagatttttttttgtgttgagttttttttgtttatttattataggtttttttatggttgatttatttttttgtttagtttatattttttttttttttagttttttttgttttggtttttttttggttttttatatttttttttataatttttttgttttgattttttgaattttgatttttgtttttttttatattattgttttggtgaatttttatgtattttttaaaatttggtttaaatattttgtgtttggtttgggatataaatgatttgtgtataaatttttttttttttgttagatttttttttttaaatgtgaaagtagttttttagattataaaaagtaattgagtattttttttttaaaatgtaggaagtatagaaatgagaaagaatttaaaatttatttgtaagttagtgatatttatgtttgaggttttgttgtatagtttttaaaattttttttatgtttttattagattttgagggtagggttgttgtttttgtttttttttgtgttttttttttgttttttgttttttgagatggagtttttttttattatttaggttggagtgtagtggtatgattttagtttattgtaatttttgttttttaggtttaagtgatttttttgttttagttttttgagtagttgggattataggtgtgggttattatgtttggttaatttttgtatttttagtagagatggggttttattatataggttaggttggttttgaatttttgattttgtgatttatttattttagtttttttgattttttaaagtgttgggattatgttattgtgtttagtttgttttggtttttataaagaattttataaggggttaggtgtagtggtttatgtttgtaaatttagtattttggaggttgaagtaggtagattgtttgagtttaggagtttgggattagtttgggtaatatagagaaattttatttttataaaaaatataaaaaattagttaggtatgatagtatgtgtttgtagttttagttattggggaggttgaggtgggaggattatttaagtatgggaggttgaggttgtggtgagttgagattgtgttattgtattttagtttaggagatagagtgagattttgttttaaaaaaaaaaaaaaaaaaaaaaaaaattttataagatattaagtaagtgatttggatataataggtgtgttatgaaattatgttgaaggagtgagttattggtggtgagttgggatggtttttttgtggtttttgtaggtagatgtagtgatttttatgggttgtttttagagattaagtagaaatttttttggttaattttatttttaggatatttggttttttttttggaggttgtgttggagggtttagtgggtgggtgttggttttagtgtgggggttttggaaggagttagtattttaggagggagtgtgggtatttagatggttgaaggggagggagaggaagagaggtgttgtagagggtagaggtatttttgtttgtttttttgttttagggtttggtgaggtttgagttttatgttggtggggtggatttttggtttttgaggttttggttttgtttttggatttggtattttttttgttgtttttttatagaagggtgtttattttttggggttatttttggtttttttaggttttgggtggggatggttttgtttttttttttggatttttgttttttttttgttttttaatatgggtgtttttgggtggagtggggtggggttgggttgtagtatttagtattgagtttgtaagggttggttgttggtttagagttttttttattagagttatttttttttggttttttagttatattagttaagtttttttagagttgttttataaggtgggtgtttagtgtttgtttatgggtttggttttttgtttttttgggatgtttattgggggtaagagggaggttaggtttagtgtttagtttagttttgggtatgttttagttttgttttatgagttaattggttttgaattattattttattttttttagttttaattttttgatttgttaaagaggtatttgtagaggtggttgggggttgagtttttatgtatttatttattttaagaattaagaagggagtttatagtggttttggggttatttgtgaatatggatgtgaaattggggtggggtagatatggtagtatgttttagtagtttttttgtgatttagagggtttggaaatttttgttatgtgggtggagtgttgagggagtagggggttaggtttttttgagttgatgatggtgggtgtggttttttgtatatttggtttgtattgggttgtgtgttttaggggtagaatagggaggaattttagtatagatagtagggttgttagtatagtgttgagtatagggttaattaaagtatagggttttttggaattatttaatatagagtagtgaagaggtggttttggggaaagtggggttagagttgagtttgagtggggggtggggagggtgggtattagtttgtaagggagggatatttattgggttttagaagtttttggtggggattagggattgtgaagttggggagagggtgattattgtgatttagggaggaagggttttatagatagtttagtttttggttttgtgtttataggatattttatataggttttgagtttatttttggattgtggattttttgaggtagggtgtgtaggtttgtttagtattaggtgtaaggtagggggttttggtaagtgttgagggatttattggtgtttgatgaagtagtgagtttggattgtgttatgttttgggttttgagtttgtaggatttttttgtggggttgtgtgtttttgtttttggaggtgtttagaaggtattgatgtttttgttgggatgttttatttggaaggttttgttgtttttatttttttttatttttttgagttgtttgtagagggtatttaggtttttttttattttgggattgggtttttttttttttttttttttaagaataagtattttttttttttgaattgtttttggagttttttagatttaggtttagagtgggaagttttgtatgtgttgggggaataggaattaatgtgggaggattggttaggtttggtgtgttttttttgtggtgggatggggtggggttagagaatagagtttggttttagagtttaggaagagaatttttttttttgttggtttgttaagtattgtgtagtggtgagaggaaaggagggttggtttgggaatgtagtgggtgttgagtagttgtggaatattttaaatagagtgtagttgtggggaagggtggggttaggaggtaggtgttgggggtggtttttttgttttgttttttgtagttttgtggttttgattatttagtttggttttaggatggagttttggtttttagatatatggtattgggtgaggttgttttttagtatttgttttaggaagttagagtagttgttagaagagagaggagttgtgtttgtatttgttgttttttaggtttgggatagttgttgggattgagggtttgtataatggtgagtttgtttggaggggtgtgttgtggttagatagttatgttttgtgtggtgtggatagagggtatatttagttttggaggagtgtatttagattttttgttttggggtttaaagtgtgggtagtttttaattagattttggattttagtagatagtttgggaggatgttatgtggtttattttgatatattgttttatttgtgattttatttttgagagttgtagggaggtgtttttttagttggattttattttttttttggggttttttgtgggtgttataagtgattttgttttttttagtttaaggggggtttttggggtatgggttgtaattgataggttagagtagtttatggttagggttgagttttttttttgttttttttgaatattgggtttaggaaggggttaaagtggagatgttttgattaaagttgagggaggtatggagtttttttgattttgtttttttattttattgttgttattgggtgtattttgtggagttttaggatttttaaagaatttagagtggagatttttggttttatttagtgtaggtgagggggaaagtgatttgtttatagttatatggttattattagtatatttgggttaagtttgattttattttatggtttttgtttgaaatttggaattggaaatggttttggaaattattgattttatttgttgttttttaaaatggtttgtagaggttaagatatagatttttgtaatgttttgtttatttgtgtgtggggaaatggtagaggagtattggttttgtttttatattgtttgggttgttgtttttgttttgtttagtggtttttttttttggtttgtttttttattgtggaagtgggtataattttttttgtgtagtgtggttagagtggatagtgatgatttgtgaagtagggtggagtgtttgggggatttgtgttaaataagtatataaataaaagttaatataatttttatttaattagtaagtaggttttgtttgaagtttttgggtagtattttatgttatttttaggttttaggttggtggtgttgttttgtgttttttttatttgtaagttggtgtttagaagttttgttttgtgttttggtttttattttttttgtgatttttttttttttttattttaaaaagtaatgtatgatggggtgtggtggtgggtatttgtagttttagttgtttgggaggttgaggtaggagaattatttgaatttaggaggtggaggttgtagtgagttgagattgtgttagtgtagtttagtttgggtaatagaataagatttttatttgggaaaaaaaaaaaaaagtgatgtttagttatttttagatagaaaatgaagattatatgaaatttggaaagaagttttttttttttattttttaatttttttttaaggggtggttatgttgatagttgggtgtggtatttttttgaattttatttttgtagagttatttagggtttgtgtaaaaaaagttaatgtgtaaatatagattttttaagaatataaaggaaattagatttttgttattagtttttattttttttatttaataatattgttgttatttgtagatgtagtatgtttttttttttttttttttttttttttttttgatagagtgtggtttaggttggagtgtagtggtgtgattttagtttattgtggtttattgtaatttttattttttgttttttgtttttaagtgatttttttgttttagttttttaagtagttgaaattataggtgtttgttattatatttggttaatttttgtatttttagtagagatggggttttattatgttggttaggttgtttttgaatttttgattttgagatttgtttattttggttttttaaagtagtatgttttttttaatggttgtgttattagttgttttatggttttgttaggtttgtttagttttttattgtgattgagaggttgtaatagatgtttttgtatttgtatatgtgtatatatgattgaaggatgagtttttagtgaatttttgtgttaaggatgtgtgtatttaagttttgatttgttgggtatagtggtttatatttgtaattttagtattttgggaggttaaggtgggttgattatttgaggttaggagtttaagattagtttggttaatatggtgaaattttatttttattaaaaatataaaaattagttgggtatggtggtttgtgtttgtagttttagttatttaggaggttaaggtaggagatttgtttgaatttagtaggtagaggttgtagtgagttaagattgtgttattgtattttagtttgggtgatagagtgagattttttattaaaaaaaaaaaaaaaaaaaaaaaattgatttttgtttttgaattggtttttaaagtggttattagaattttttaggatttttttttttgttgatttgtttagttgtttgttgggttttgtgtagtgatggtttagtagggaggttttatgttttttatttttggttgagggttaaatgttttttaattggtgttttattttgtgtattttggttaagtgagagggattatttttttgtatgttataggttagggttttgtgttttttttttatttggaaggtgtattttttttttgttgaaattttttaaaaagagttttttgtaagttaggtgtgatggttaatatttataattttagtattttgggaggttgaagtgggtggattgtttgagtttaggagtttgagattagtttaggtaatatggtaaaattgtatttttgtaaaaattagttgggtgaggtggtgtgtttgtagttttggttatttgggaggttgatgtgggaggattatttgagtttgggagtttgaggttgttgtgagttgtggttatattattgtattttagtttgggtgatagagtgagattttgtttaaaaaaaaaaaagagttatttgtatatttttattatagtaggtatgagtattttgtttttagttgtttatttttgattttgtttttgggatgtttttttatatagaatattttaattttgatattgttaagtttttgtttttttttttagtttttggaatttatattttgtttagaggttttttgtgttttgaaattataggaaagaattttatttatgtttttttttagtatttttgtggttttatttttatatgttgaaattatgaatttattggaatgtattttggttttagtagtgaggtaggggtagatggtattgtttggatatatagtagtgagtttggtttggagtgggtggggtgtgtgtgtgtgtgtgtgtgtgtgtgtgtgtgtgtgttatttttattagttttggtgtttgtattgtgttggtttagtaaaaataatttggatgtattttttttattttttgttttttggaatattttaagtagtaatataataatttttttgttaaaattttttaagaatttatttgtgaaattatttgagtttgatatttttgggggagtttagtattttaaaaatttaaattttttttatgggtttgtgagtttgggagtttttttttttttttaaaatttattattattttttttttagaaaagtgttttttagtttatttaaaatttgttagtttattttgagggggttgttttagtttgtttagtgaggatagtgtgtagtgtggtgattgatatgattgattagtagagtatgattgattagttggtgtgtaaatatgattgattgtggttagtgttttgggatgttttatgttgaggtatatgtgtgtagtgtagggtgatgtgtattttgagaggggatgaagttataggatttttgtatttttaggagagagtttttttttttaaggttgtagttttgagtaggtagtgatgggattgggtttagggggttgagtggttttagtaggttaagggttttaggaattatgagaagtttggagttgtttagagagtagtttttaaaattagtttggattgtagtttttagaaagatatgtgattgatattatgaattaggatatatttatatatggggtgggggtggggatgggatgtattaatgaaattaaatttttgtgatggaatttttatttttattatgtgtgtgttatatttagtatttttttttttttttttttttttttttttttttttttttttttttgtttgtttgttttggagagagggaaggtttttttttatttttttttaaatagttttattgagatttaagtaagttattatataatttattaatttatttatttatttatttttttgagatggagttttatttttgttgtttaggttggagtgtagtggtgttattttggttgattgtaatttttgttttttgggtttaattaatttttttgttttagttttttgagtagttgagattatagatatgtattattatgtttggttaattttgtatttttagtagagatggggtttttttatgttgaggttggttttgaatttttgattttaggtgatttatttgttttagttttttaaagtgttgggattataggtatgagttattgtgtggtttaatttatttatttaaagtgtataattttatggtttttagtttatttagagagtagtgtaattattgttattataattaattttagaaaattgaaaatttgagaaatttagaaaattttttttttaagaagaaattttgtagtttttagttattaattttgttttttttttttatattttttttttatttgtgtggattttttttttttttttttttttttttgagatagggttttattttgttatttaggttggggtgtaatggtttaatttttgtttattgtaatttttattttttaggtttaagttatttttttattatggttttttgagtagttgagattataggtttgtgttattatgtttggttaatttttgtattttttgtagagatggggttttattatgttgtttaggttggttttgaatttttgggtttaaatgatttttttgttttggttttttaaagttttggaattataggtgtgagttattgtgtttggttgattttagatattttttgtatagagaattgtatgtttggtttttgtgtttggtttttttatttggtgttatgtttttaaggtttatttatattgtggtaggtgttagtgtgtttttgagtaatattttattatggtatggattattttattgtggatagatatgttgtttttattagttgagggatattgggttgttgttattgttggtgagtgtattttttttaaattaaaaaaaaaatgttggttattatttattagattgtttttttggtttatagggtgggataagttggtttgggtgagggttaggaggtggttaggtggaggtggttggagtggttttgggttgtttttgggtgtagtaggtagaggtgtaatggtagagtttgagtaggttttttgggtggatttttatgttggtaatgtttgtttatttaagaagttttggttaggtgtggtgttttatatttgtaattttagtattttgggaagttgaggtaggtagattatttgaggttaggagtttgagattagtttggttaatatggtaaaattttgtttttattaaaaatataaaaattagttgggtgtggtggtgtgtatttgtagttttagttatttggtaggttgaggtaggagaatttgtttgattttaggaggtagagtttgaatttaggaggtggaggttgtagtgagttaaaattgtgttattgtattttagtttgggtgatagagtgagattatgttttaaaaaaaaaaaaaaaaagaaaaaaaaagaaatttttagtgttgttttgtgtttggtattgaagttgagggaaggtagtattagtatgagtttttagtttattgggtttttgtttggagttgatgtgtgattaaggtatatgagggaagtatggtgaggtggatggtgtggaggtataaggagtaaaataaggtagatgtagtggtttagtggtttttggtggttgtgaggagtgtgggtaggatagttttaggagggtatttggagagtagggttggttggggtaaggtgtgttaggtatttgttaggagtaaaatgtaaggggatattaaagagtttaggaattaatatagatagtatttaatgtagtattttttaatattgaaatgatgtatagtaatttttatgatgaataaatgttggaattttaaattaagataggtttagttttgtatgtgtatagttttgttagagtttgtttagtgtggaatttgatttgtttaaaatgttgttttaaaatattgtttgatttttggattttttggtattgttttaatttttgtatttggatgaaggttttattttaattttagttggagagggttaagggttggtgaatttggttttggatttgtagagtttgtggtatttgagaggtggggttaggaataggaaggagttggtgagaatggtatttggtatgggatggggttagattagagtagtattgtggttttttttaatttgtggttttgttgttggatgtttggtgttggtgttgagtttttggttttttgaatggagtgtgatgaataatggggttggggagtttttgggtttttttttgaagtagtagtgaagttagggatatgttggtagtaggtagggagagggatgtttggtttgtgtttggagttagttgttttatggaggagttgggtgaggatgtggtgggaggaagatttttttagttttgtattttttgaagtataattgagtgtttgtgtggtttgggggttattttggtttgaggatagttttgttttgtttagttaggttttgaagagttattgggatatggatagtagttttgttgggtggtaggttgtttatttttgtttatttaatgttggaattggatgtagagtatttggatggttagttttagagtgtttttgatatttttagttattttattttttagattaggataagatgtgggattttaattttgagttttttatgggttttattttatgtgtttttataagttattgggtttattttttggttttagggttgtttggttatttggtattttggtttttttatttgtataatgaaaataatagttttagtttttttgaggagttataagatgttttttgtgtgaaaaattgggatttggtattagattatttggatttgaattttggttttattttttttaatttgtggttttgggttaatttggtttttttgtttttagtttttttatttatagagttattttattgagttgttgggaggatgaatataaggaagtgtatttatgtgtttagagtattgtgattttatttattattattaaatgaggtatataataagtgtttaatagatgtttagtgttattttatggattttgtgtgttttgtgtgtttttagtagttaagttttggaggtggggaagttgttgatgagttgtatgaggtaattagaaagaggaggttataggtgtaagggtttgggtgatatttgtggatagagagaggttgatggattttggtagaggggaagggggtttttgtatatagaaaatgttttttgtatttaagatttttgtgattttggaatagaggtagtagaggtttgtaaattttaaattataaatttagaaagtatagaatatttgtagagaggattagaaatattatatattttagtgtgtatagaattttttatatagttaaataaaagtatgtttttaattgaagttgttggagagtttttgaggattttatattagataagggttggtaagtggaagtttaatatgtaggagttattttttttgtttataaatgtttgttgttttttttgtttatatttgtatttatgtgagggtatttataggtttattgtttagttttatgttttgtttgttattaaaaaattttttaagaattttttagttgtaaatttttttattggagggggggttttaggaatttagttttgtttggggttggggtattttagtatttgttgtataggtgttggttattaaaggttatgtgttgtatttgtgggtttttggggtttggtggtatttgggtatatagtttagtggtggttttttatttgttagatattgggagtggggggttttttatttttgttttttggtggtggggggagtgttttgagttgttatatattagaatttattgatttatatgttgtggtattttatagttttttgatagttttttagtttgagagattattaaattgagtttttggagagggtggttgttgaggtttggatataggtgtggataggatagttttgttttattttggagttttgttttggtttagttttttgtgggtttgaagtttaggttgggttagtttttgttttttagatggttggaaaggtagtttagttttatggtttttttgttaggttttgagagttgtttggtttttagttttgtttttttttttttttaagatggagttttattttgttgtttaggttggagtgtagtggtgttattttggtttattgtaatttttattttttgggtttaagtaatttttttgttttagttttttgagtagttgggattataggtgtgtgttattatggtaggttagtttttgtatttttagtagggattggtttttattatgttggttaggttggttttgaatttttgattttaagtgatttgtttattttggttttttaaagtgttgggattataggtgtgagttgttatgtttagtttttagttttgttttgatttttttttaaggttgtgaggatgtttatgtttttttttttttttatggtttattgatgtttttagatgttttgtaaagttattttttttttgggagttttttagttggtgatgggggattttttggggattattgtttaggtagttatgtaggtttgtgggttgtgtttttaggttggattgagatttggtgtatggggtgtttttggtttgagttgaggtttttggaagttatagttaggaggtagtaagggatggttgttatgtttttttttttttgttttttagggtttttgtgggatagatttttttgtttgagttttttggttgtttatattttggttttttaaagtttagtttgaagttttaggtattttataatttgttttttttagtagtttgttttgttttttttttgttgatgtttttgaaatttttttgtttttttttattttttggttagagagagattggagattttgtgggaatttttgaggggagggagaaggttgttgtttgaatggaggtggtttttttttttgtttttttttaggtgggttatatttgtaggtttagttttttgttgtggtagtgtttggggtgttggttgttttttgggtatgagttgggagttgagggaggtgtttttaggattggagtggtaatttagttggaggaggagtaataggtttgtggttagtagtagttgttgtagggattttggtgttgtatttgtgttttagttgattttttttgtttttttagggtgggttggggatggtggtttgttgtttagtttaggaagaagaggggttgtaattagtagtagttattttaggggattttagtgttgtatttgtgatttagttgattttttttttttttttagggttggttgggaatggtggtttgttgtttagtttaggaggaagaggggttgtggtttttattttagaggttttttttttggttttttttttggtgttggtttaattgtaggtttgttttaggttgtgttggtatttgttgattgatgtttagtggatgttgataggagagggttgggatggggaagtagtaagttttggttattgtgggtttgggttatagatggttgaggtattttttggttatttttaggaagtaaggttttatgtagtttttgatttatttattgtttgtgtgtattttaggaggttgtattttttaaggtttttattaggtaattttattgggttgggtgttgttgtaaaattatttattgggtgtggtggttttttggtggggggtatggttggggaggatgtggtggaggagaagttagttttgtggttggggggagggtggattatttgttttttgtttgttttttgaattggagtttatggttttttttttaggtgtttgggttatggaagaggttatagttttgttttatttttgtggtagtttaggggagttttggttagttttgtgttttttgggagggtgatagtttggttaggttgtagggtaggattggaatgtagatttttgtttggttatgttgttgtttggttgttttgtttggggattttttgtttaggaagagagaagtgggttggatagtttggtttagtgattggaagtttagttttttatgtttagtttagtaggaagtttgtttttttggaatatttgtgtgtttttgtatgtgtttttttggttggtggttttgtgaggtttttattgggttgtgttatgttttttggttattttggttttggtgtttggtttttgtgaaatagagatatttgggtagttttttatttgtgtttgtaagtttgtgtggttttagtgatggttgattttgttttatttagaggatttgggaatttttagtttaattgtttagaggagttttttttagtggggagagtttgagttgtttttttggtggatagttttttagattttaggtggatttttttgttggttgttttttttgttgtttttgtttttttgttttttatttgttttttatttttttttttgtagtagttagttggtatggggatttttttttttttttgggattgtgaatgagatgatttttttggtttttttgggtttagatttttttggtaatagttagtgaaatttttgttttaggtgggaggagaaggtttagtatgtggttataataatggttttaattatattatttttaaatgttggtttttatttattttttgttttgtttaatagttatttttattattttattttttagattaggaaattaaggtgtagagagttttagttatttgtttgaggtttttatagttaagtgtttggatttgaattttggagtagtttggttgttgagttgttttggagatggggtattgtgtagtggttggggtaggggtggagttttgttgttgttgatttttgggttatttggagtgataatatagtttagtgtttgggtttttgtttgagattttggttggatgttaggagtttgagattttttagtttttttttgtgtaaggtgttatggggtgaaatgaaagaaaattttagttagaaggtgtttttttttttttttagttttttagttgttttggattttgaaataagatattgtttgtttgtggggtgagtaggaatagattggaattgtatttttttttttttagttatagttgttaggagtttatttttttttgttttttttttttgttgtttttttttataagattgggttggatgttgttgggaaagttaataggaagttttttggttgtggtggaggtgggggtttgtgtttttttggggattgagatgagggttttaggttggttttggtaagagtagggaggtttatgtttttgtttgttggttttgttttttgttttgggagaaggtatttatatgttttagaatgtattttttgtgtgtatagggatggtttttgggttatttatttgaggtttattgatttttttttttggaattggagtggtttttttatggtggattgggttgagttttttgttttggttgatgtttttttttaggtatttttttttattgtgttagggtgtaggttgttagtggatgggtttttatttttggggattggtagttgttatgtttattttatagttgagatattttggttgaaggttttgttaagttttatggagtgtagggattttttttgagatggtttttttttgttgtttaggttggagtttaatggtttaatgttttgtttattgtgattttgattttttaggtttagtagtttttttattttagtttattaagtagttgggattataggtgtgtgttattatgtttggttaattttttaattttaatttttttttgtagaaatggagttttattatattttttaggttgaattttaatttttgggtttaaatgatttttttgttttggtttgttaaagtgttgggattttaggtatgagttattgtgtttagttggggtttttttttaattttttttggttttttttaggtgtaggatttgggttttagttttatgtgtttttgaatagttttgggttttgttttgtattttttgggtgtgtggttaggttttttgtgatattagtaggagatttaggtgaagaagtaggtagaatggaatgtttgtttatttagttttggggttaggtggggtggttaggatagtagtagtggttggtgtggttttttgggaggttagtttattggtgtggttagtgaatggggaggggagtttttttttttgtttttttttatttttggtttttgggtttttagggttaggtttttagagttttaggtggaggatggaggttagggaagttggggtaagagtgggttgggggtgggtggttaggtggattttggaaaattattttttgtaggttttgttttttttagggagtatttagggttggttttggggagttgggttaatggttattttggatggtgtaggggtttatttttatgaaattgggtttatttttatgaaattgggtttatagaagtttttggttttggttttgttttgttttttggtttttgtttttaaagtaggatttaggatagttttgaattttttgttgaaatgtagttttttgggttttaatttagttttttagaattagagtttttggggtgggttttttgtttgtttagtagtttttaggggatatttgtgtttgttagagtaagtttaataagtattgttgtaaattttttgtttttatagttttttggtttgtttttttttttttgttgggatttgtattaggattaaatgttaatattagggattaggttatatttgtgaattttgagataatatttgtattttttttttttttgaggttgttttgtttgttttgttatttaggttgaagtataatggtgtgatatttatttatggtaatttttatttttagggtttaagtaatttttttgttttagttttttgagtagttgggattataggtttatattattatatttggttaatttttgtatttttagtagagatggagttttattatgttggttaggttggttttgaatttttggttttaagtgatttgtttgttttagttttttaaagtgttgggattataggtgtgagttattgtgtttggtttgatatttatattttgattaagttgttgtggaaatattgagttttttttgatagttttgtttatagagtgaatgtttaggaattggtgaggtattttttatttttatttagatggtggtttggaggtagtgtttttgattttgtgatgggatttgttttttttgtttaagagattttagagatgtggtttttgaatgtgggggtttttgttggggtgggaatgggagttggttttggttattgtttagtgattttattttagtgttttgattttagtatttttgattttagtgtttttttttttttggttttgtgtggagattatgtggtttgtgttgagtaattttttattgtttttgttgtgtttttgttgtagggaagtttttttagggagttagttgatatatttggtttttattatttgtttttgaataggaatgaaaggagagagtgagtaagaaagtggtaggaggtgggggttgtagagtaggggaaggttagagagaggggaggaaagatttggaaagtttaggtatgtgttttggaagtaggtgttagtgatgagtttatttggagggtggttgtttgttttgagttttgtttggggttagtagggaatattttgttagggtatgttgttgggagtttgtttttggtttattttttgttgttttgagtgttgagtagatttgtttttattttagggataatgtaaggaggttgttattttattttttattttattaatattttatgaattataagtgattatttattgtgttttgatgtattttaggtgttgggtttgaagttttatgtgttttatgggatgtatttgtattattgttgtagaaaatggtttttgttattattgtagagaaggtattgaggtatagagaggttgaggaattggttttaggttatatagttagaagtggttgattttggttgtgaatatagggttgtttgattttaaagtttgagttggtttgtagtgaggtttatggtttttgtgttattgtttgagtttttggttgagttttttggtttagtggggggtttagtgatttattagttgttttattatatgttgtggatatttttatggtttatttgggtgggagggaaggggttttaggaggtgggaggggtatagggaatatagtttagtttgtttgggtttaatattttgatttttaaggtattttttgagggtagtatgaggttaagtttttgtttttttttaggattttgtttttgtgagggttttggggttttttgtttttttttgggggttttgttggttaggattatagagaagttttttgttgttgatttttttgtttttgtattttttggtaagttattttatgatttagttgttttgtttgtaaaatgggttgaataatattgttttgttttggagggtttttgggaggattaaatgagatttgttgtatagaagttttttgtaagttatgttgattggtggttgttgggtttttaagtgaatgggtatttgggtattgagtgtgtggatttagtatttggaaggaggggttggggggtatttagaatttttgggaggtttggatttttgttttgtttagattttgagtttttttttggttagtttaatttttattagtagggtgagggtaattaggatttatgtatagttgggtgaagttgagtgattatatgtggaagtttagtgttttttatgtaaagtgggtaggtggttaaagtgagttttgttttagtttttttatttttggggttgtttttggtgttttgtttttttttagagttttattgatttgtattatgtgatttgggtttgggaagatgggtttagttgtgggaggttgtgtgggttggggattgagagtgttggaggagggttttttaggaaaatttagttgtataggaagttgggttagtggtttttggaagtttttgggttttgtaagttggattttttagatttgtggttgtggggtttttttttgtttgtagttgagagtttttgatttgtatttgagggttttagaggtttgggagggggatgtgattgtgtttttagggtgaagtttatttgagtgttattttggatatagtttttatttttttttggttttttttttggttatggggatgttgtttggggggggtttttttatatggaaggagttgtagttgagttggtgggttttgtatatttttaaggttgtttgatttttagtttttaagtggggttgtatttattatttaggatttggagttttagttagagagggattttttattgtttttttttttgttttttgggaaaggtagggtttttgtgtttttttttatttagggatttggtatgttgggaggttaagaggaagttgttttttgtttatttattttttaatttttttagttagtagagttttatttgtgtgtttagaatttgtgtgtggagttagaagttataaggttggtttagttgtgtttgattttggttgtgtggttttggatagttttagtttttttggagttgagtattttgatttgtagaggagaggttgttgtgttggttttgtagggttttgtgtagaggggagtgtgtgtggttgtgagtttaggttatgtttttagattggaggataggattggaatagtgggttaggatggttagagggttttagttttaggaggaggtttttatattttttagtatttttatattaggaaatgtagttaggtttttaggttttttatgttaggaagtagtattttgttttttatttttggttgtttgggtttgagaagttgagtattttttttgaatttgagtgttttttgatttttgtttgggtagttgttttttttgaattgattgtttgttttatatagttttttgtggtttgtttgatagggtggttagtgagttttttgtatagtatattttttttaggagtgttgtttgtgatgatggtgtaaagggtgtttttttgagtttttggaggtatgtagtggtgtaatagtgtgagtttaggagttttggtgagtttttggatggagaatttgtttagattattttttagtttaaattttttttgggtgtttgttgtgtttggggtgttgatttattgtggggtggtttgtgagattttatgttatttggttattttttttagtttttgtttattgtattggttttttggtttggttgtttttggaatatgagggtttatttttatggaagaatatttatttgtttttttttggaaagtttttttttagattttttggttgttttatttaggttttgttgaagtgttgttattttggagaggtttttttgttatttgtagttaaaatagtttttttatgtttgtgggtggttttttatggggtatggatgagtattggagagttttgttgtttatttgtttatatgttttttgggagggtaggggatattgatttgtgttgtgggtgttttgtatgttatgggtgtttagtgaatgtttgttaagtattaggggagtataaaggagggaagtttttgtttaattggagtagttagggaagattttttggaggaagtggtatttggtttgtttagaatgtggtgatttgtttgtatgtagatattagattagagggtaaaggttattattataatttagtagatagttataagtagttaaggaattgttatgatatggattgtttgtgattggagttaagaaggagttagagatagaggtttttgtgttttggtgtgagtttttgggggaggttgagtttttagaatgtggggttgtttgtgtagaggttggaggtgggagatatatttgtgagtgttggtgagtgtggggtgagttattggggttggattagaagatgggaatttttaaatttattaattagttttggtgttttgggagtgataggagatggggtttttgggggattaatttagtataagtggatgagatgggatgtaggggaaaggataaagttttttgaggttttgggaagttgagttagggtagagttatgatagggtgagttttagaagtaatataagaaaaaatagttagattgggttttttttttattgtgggagatgttttattttattttttttgttttttgggttttggtaatgggttgggtatagtgaatgggttttatttgtaggagtggttatattttttgggtatagttgttttatatattgtattgagatgggatttgaggttgggaagaatagttttttttgtaggttgatattgttagtttttggggagggaaggatggtagggggtttggagtatttttttttgttatttatattttgtgtttgtttgtagggttttgagttttgtttgttttgttttagttttggttaggaatttgttggagtttataggggtagttaggttggaataggaggagattaggttggtaggggagttgagagggggttttggatagtatttagggttgagttattttgggtttgtttgatttgttatttggagttgtttttgtttgtttattatgtgtaaggttttgatttatttgggtttgtttaattagtgtttttttttaggtttagttagtttggtttttgtttgatttatttattgttattagtgttatttttgtattatgtaattagtttttgtagtatgttagttattaagtttagggttttttgtgtattttttgtaatttttatagtaatttgggaggtatagagaggttgagttgttggtttatagttatatagtaggtatggggtattgttaggatttagttggatttttgattttagggtttttttagggttttgggtgggatattggtaaggaagtaaggtatgaatattggttttgttttggatagagtttggggatggtggtttggtaggtttagttgatatagtgattttggtgtaggtttaattattggtaaagtgtttaagtatatatagaattttaattggggagataggtgaagtggttaagggagggttgtgagtgataggtggatattgtatttattggtagattagttgattttggtgttttttggagttttttaatttttttatttagaaaaagaggaattaatagttttatttttaaattgggtgggagtattatatttgaaattgaagtaaagttggttgtgttataggtttggtagatgttagttgtgtaggtaatttagtgattatttgaagtaggttgtgtggtggtatttttattttgtagatgtagtttagagaggttagggtattaattttgggttatatagtgatagtttaggttatagagagtagtgttggatgggagggtgttggtagttttaggtataggttgggagggttgtggggttagtagagggagggtatattttttagttggtggggtttttttgtgttttagtatttatgtgggtttaaaggagttggaaggagggaggttagagttatttatgggtttagaagttgataagtaggttattgattttgaatttgttttattgtatgtaaattggggataaatttggggatttaatgatataatgtaagaagtagatatgttatagttttggttatatagttagtgtataataagtggtaagttgttagaggaggtagttggtgagaatgggagtattttagtagttttttgttttttgtttttggttgtagatgtatttgtttttggttatttgtgttttagttttgtgttttttggtgtgtgtgaggttaagtttttggggtggggatttgggggtgtgtttgtagtttttgaggttaagattaaggttgaggttgaggttgaggttgaggttattttggtgaggaggaaattgtaggtggagaagtttgttgattgtgattttgatttgattgtaattttgatggtgttgatgttgttagtatgtaggttttttgtttttgttatgattggtttttgtagtttatttggttgagaggtgtgttggtttttgtaggttgtaaaatggggatattattgtttgtttgggttatagtgtgtttgttgattgtatttggggagggattgagggttgattgtgttgtggggatgttggtagagaattagagagggtatttaaaaaggttaatagtttggtggggagaggaggtgtaaggttggtttttgttttttgggttttgattgaaagggaataggggatatatttggggatagttttttttttggaggaagaagggtttagggtgttggtgtggagtttgtatagatggggataatgagttggagggtgttgggtaggagttggttagtaataggttgatgagggaggttttgttggttgggtttggtttttaagtgagtattttgagttgtggggatttagggggttttagagattttagagttgagatttgggattatagaggggtgggttgtgtttagggtaatatagtggatggggtagatgttgtgaaatttgtttttttgttttttttttttttgttatagaattggatttttttagtttatggttgttaaattttttagatgtttttgggttttatgggtgttttatattggtttttttgtaggatagtagattttgggggttggttttgatggtatttattatggggtattttatgtaagtatagtgtttttatgtttagttttttagtttgtggagtaggtttgtgtttggttagttttattttgtggttagaggagggagatagtggttttggagataggagttggtttggggttgtttttttagtttttgtttttttagtttatttttttgttttgtgggtgttggttattttttttttgttagttttatttttagttttttttgtttgagttgtgatttgttagtagggggtagtggaggttttgaaagtttttggagaggattttgaagtagtttttataaatttgtttttggaaagttttttttgttatatttttagtggtttttttttttttaatattttttttggggttgttatgtagtggggggtggaggaatttattaggttgtggatagagtagagttatgttgatataaattttggttgaatttatatgttttttatagttagtggttgattattggaattagggaagtgattttatagtaagggtttgtagagtagttattatgtatttttgattttggtttttggatttagttttggaaaagaagttagattttagttatttggagttgtttagggaagattttagtttggtgttggttgatagtttattggaattttttatttgtttggttaggtgatgttaaggggtagaggttagaagtgttaagaagtaggttgagggtggtggtttatgtatgtaattttaatattttgggaggttaaggtgggtgaattttttaaggttaggagtttaagattaggttggttaatatggtgaaattttatttttattgaaaatataaaaattagttaggtatggtggtgtatgtttgtaattttagttattttggaggttgaggtaggagaattttttgaatttgggaggtagaggttgtagtgagttgagattgtgttattgtattttagtttgggtaatagagtaatattttgtattaaaaaaaaaaaaaagaagaagaataagaagtgttaagaagtatttgtttttttgattgaaaagtaatttttgttgggtgtggtggtttatgtttgtaattttagttttgggaggttgtggtgggagagttgtttgaggttaggtgtttgagattagtttgggtaatagaggtgttaggggtagtggtgtttgtttgtagttttagttttttaggaggtttaggtaggaggattgtttgagttaggagtttgaggttgtagtgagttatgattatattattgtattttagtttttgggtgataggatgagattttgttttaaaaaataaaatataaataaaaaattaatgtttattttttgtgattttaaaaattatatttatttgtgataaaataattaaattagaaaatgtaaaggaaatgattaataataattgtgttttttagataaatattgttaatatgtttatgtttttttttagtttttttttatatagatatttaatatttattaatttgttttgaattaaagatggttttttttgttttgtatgagaattattttagttaggtatggtggtttatgtttataattttagaaagttgaggtaggtagattgtttgagtttatgagtttgagattagtttgggtaatatggtgaaattttatttttataaaaaaatataaaaattagtttggtgtggtggtatatgtttgtgtttttagttttttaggaggttgaggtaggagaatagtttgagtttgggaggtagaggttgtagtgagttaagattgtgttattgtattttagtttaggtaatgggagtgaaatgttgttttaaaaaaaaaaaaaaaaaaaaaaaagttgttatgttgttattttttttagggatttttattttttttattttttgtttaagatttgttttgtaaaaggatgaggttaaatagttatgggagggtggtattggatgtttaaaaaaatgttttgtggttggtgggatttagaaataggttggggaggttttagtagagggtggattttagttgggggtggggggtagtaggggggttttttatatgttttttttgtgtgttttatggggttgtttgtgaggttgtgtgaattagagtttggttgggaagttatatgttatttggattttgattttttttggtagtatgattttagttaatatgtttaattatgtttttttttgtaaaatgggttaatagaaatgtttatttgagatatgatgagaaataaaggtgtttatagagtaaagtgtttagaatggttttggtatgataggagtttatatgttagtgttgttgttggtattgttattattatggtggtattggttgttttgttttttttttgtttttgttattttttttttttagtaggtttttatttatttgtttatttatttatggttgaggttttgtttgtgttaggtttggtgttgagaatgggggtagagagatgggggttgtgttttgttttttgatttaagggttttttttgtaatgtgaagtttttggagattggatttttaggttgttttattagtttttttttaggttagtttaatttttttgtgtttgttttttgagttgttagaggaagagagtgggaggaaggatggagtggggtttttgtggggattgagtggggggtgtgtgaggttttggaaatggtgtttgtggtatttatgtagtattagtttttgttgtagttgttgtttggagaatatttttggattttaggatattgatgatagaaggtggaatgttttttttggaagttattaagaggggattattgtggtggttgagtagagttgttgatttgtgagttgtggtttgattatagttattgtttttatgagtgaggttttttgtggttttttttttaggaatttttggttttttggtaggggatagtttagggttgggggtgggtagtggtgtttgtaggtttttttggagttagagaattttttgttgttgtggtggggttgtttttttttgtttttttttttttgttgtgtttttagttgttttgataggatgtttttggtttgagagatagaaattttaattttgaatggttttagtttttaagagaatttggagtttttttgtgtaaaatgagatgttttgagtattgaggatgttgtgggggattttttattttattatttttagttgtggtgttttttttggttataggatgttgtagttatgttgtagggaaggagagtttttttttttgtgagtttagggagtttttttatgtagtttttttattggttattgtttgagatttgatttggtggtttttgttttaaggagtagaaagggggtttgttaggttagggtggggttgggtgtgaggattttttttggttaatagggtttgtttaggtgtttgttttgttggggtagtagggaagggatttatatgtggtattgggatatggagaggtttttgtgtttgtgatggttaaaagggatggtgttttagttatgtttttatttattttgaggtttagtatggttatgttggaaatagtagtattgttttttttattgttttggtttgtttttaataggttagaggggtggggttggagtgggtgtttgatttgtggttggatttagttgtttgtggataggttgtgagtgaatttgtagaggaagggagatgggaatgttgggatttttttttgtattttttgaatttttgttttttgtgagttagatggggagtgtatttttgttttttttttttgggtattttttgtgttttttgttttaggtatttgatgttgtttgtttattttttttttttgttttttttgttggttttttttatatggttttaattaggattttttgtttgttggtggatgggtagagaggggagtttgttgtggggttttttttgattgggggattttttagtatagagttttttggtttttgtagggatgttgtgtgtgtttgtgtgagtttggtgtgttagaagtgttaagttgtagttgttttgtgtgttttttatattttttattttttaaaggttttgggtttggtgtttgtgggttggggatttgtgttggggtttttaggaggtttttggtgggagaggtagggtttttttttttttaatttgggtaattttgttttggtttgttgtttgtggaaagtgttttaggatatggtggtaggattggttggggttttggttttaggtttagttttagtttttgttagatttattttttttgtgtttttgtttattttgtttatttgtagggtttgtaggagtattttgagagttggtagggtggtttgtttggtgtttgtatagggtttgttggtgggtggttgaggttgtggtgaggtttttatggtttttttgttttgtatattttttttttgttgtgttgttttgttagtatatgagtttgtattgtttttgagtttgtagtttgttttttttattaggtggttaagtagggtggtagttagggtggtagagttttattggtttgtaggggattttttgtgggttgtaggtagttttttgtggttgaaggtgttttggtaggatttgtattatgatttttgttaaagtttatgtttaaggtatttgtgggtatttttgttttagatgtgagggttggtatttttttttgtatgtgaagtaaaggtttgtttgaaggagtgtgtggaagtttgggtgtgatgaaggtaaggattggtggtttattttttttgtatttggattttgggtggtaggtttggggtttttagtttttaatttaggagggtagttagttgttggaattaagagtgaattttagttgttgttgttatagttggagggaagaggggaaaggaggtgttgtaggggagtagagattttattttttttttgttgatattaggttgttggtgttggatggggttttggtaattgtggtaggagtggtgatgtttgatgatggtaataagggttttttgaggattttgagttgttttaagggttttttatttggagtaagtattttttttaatttttttaataatattgtgaaattgattttgttgttatttttattttattgatgaggaatttatagtttagagatgttaagtaatttgtttaagtttttttttgagtatggtagagggagggtttgaatgtggaaagtttggttttagtgtttttatttttaattattgttatttatttttttggttagttttttgattgtaaaatttgaggtttagaggagtgtagtgatttggttagttttgtatggtaggttagtggtagagttgagtagtgttttttatgttttgattttgtggttttttgaggtggtttatttttaaatatgttttttatggtggttttgttttttttttttttttgaatttgttagtttgtgtttaggtagggggagaagtagagtaattatgttgggtgggttgttgtgttttagtgttgtttgttttatatttgattggtagtagagtggtttttttttggtgtggtttggaggtgttagtggttatttattagtatagtttagttttatatatgttatttttaaaggatgttgatatagaatgaagtagttaggggaggtggatgttttggtatgagggtggtgtttttggtaatttgtagtgttgttgtttgtggttgtttttggttggtattttatttttttttggttgttttgtagttatttgagggaggttagtatgttgtttttattttaggatagtgtgaatgtagtagtgtaagtttgttagtgttgtattgtgggatttggaggtttttgtttttgagttttgtttttgtgtaatttttaaagtatggattttttaggggtttttatttttttatttggaaaaattttatattgtttagggtttgaggtagggttagagtatggagatgttgttggaggattaagggagaattgagtgtgtgtttttttggttttagttttgtgtgtgtgtttatgtatgggtattttgttatttatattggtttttatggttgggtgggagttgagttgagtttggtggttgtttttttattttgtgggtttggttggggagtgtgaggatgtttgttggaagttaatgtgtatgaaagagttaatggtggattttatttttttagttttttttttagtttttttagggaaagggtaggaatagagaggttttatttttagaggaaggggtgggtggggatatagtgttgtttggtatagttttttttgagttattttgtatgttttattttattgatttttgtagtttagttgtttagagtggatttagaaggtggagagagggtttttaataagtagaggatggagtgaatgtgagatttattattgggatttggtaaagtaaagagttttattttttttttgtagatgggatgggggtggggttggagttagtggggtgggggtatttagtaagagtttttttttatttttttattttttttgttatgggtttttttttttatgtagatttttagtttggaatgattagtgtttagttttttttgttttttttttgttttgttggagggagtgatttggtttttggttttggttatttatattttttgttttgttgtattagttttgtggtaggggttgtggtggaggtgggtaaaagttgtttttgggtagttagtttttattttgggagtgattgaaagtttttgggggtttttgtagggtgagttgtttattttggttttggtaaggatatttaggagagggttagggtgtttgtatttggggtatagtataaagaatagttgtaagtgttttttaggtaggagggtgttgaagtattgggaagttgggatttagaagtattgtttggggtggtgagtggaagatgtaggatatagatttatgtgattgtgtagattatttggttttatttttttggtttatagtggaggaaattagaggttgagagaggtgaagtgagttttttggggttatatagtttagttaggtttagggtgttgattttttgttttgtttttttgtgtttatttggttggtattagtatttttgttttgatatttttgtgtggtagttgttgtgattttgtgatttttttttattttattttagtggggttttgtgagggaaagaagaatgttttatgtagaagtggttggaaagtaagaagtttggagagaagtgaggtttttgtggtttggtttgagtttaggatttatggtttggtttttagggatggagtattgattttttttttttatatttttattttatgtttttaggagttttttatggggaagttggaatggatttgggtttagagattgtaaatttattttgttggatgtgtggttgtttttatgtaattaatttttttatggagaagttaggggatggtttttagtatttttgggggttttttagtgaggtgggaggattttgagaggttaggaggttgtttaagattttttgttttttagggattaggtgagggtttgttgattgttttgattttttgatgtttttggtggggagattttagaggggtttgttgttattattgttagtggttttggtttgtttagttatttttttggggtggttaaattttatgttgtaaaagtttaagtgaattttagtagtggtttgggagaattatttgttatgagttaaggatggagtttttggggaggattttttgttgttttttaattttttttgggtatatttttttgtagttttattttttgtaagaaagttaggtgttttttgaagtttttttttggttttaggttagaggtgatagtgggggttttttgtttgtgttggtgattgtggttggttgttggtgtttggttttgttttgtattgtgtatttattgaaggtggtattatttgggtttttttggtggttatgtatgggtgagtagtttatgatatatttgtttttagtattgtgtgggttggggtttttagaggggttgagggtttggatggttttgtaggggggtgtttttggttttgtgattgaaaggagttgaaggtttggagaagttgttgggttgaggttagtttttatagatttggtgaggagggaatagatgtttatggagttgttttaggtattgtatatattgttttattttgtgttgatagttaagaggttggttttttgttgatttttattttatagataatgtgtttttttagttttttagtggtggagttaggatttgaatttatgtaggtagttttttgggtttgtagttttattttttatttttttttaggatttatgttttggggttggtaggataatgatttttagagttgagtatattttaatttttagtatttgggattatgttaggtgatatggtagggttagttaaggttattaattagttggttttaaaatagggagatgattttggatgatttatatgggtttgttgttattataagagtttttaaaagtgtaatagattatttgaggggtgtagtgggagaggtttggaaggaggaaggaggttataagttaagaaatgtaggtgaatagaaaatgtaggaaaatgtagttttttttgtagttttgggagggtgtgtagttttgtggatattttttttgtagtttagtgaggtggagtgtgggattaatttgtgttgtttgatattataagtgtgtggttatttgttatagtagtgatgggaattgaatgttattaggtagtagtgtttttattttggaagaattaggataaatttttttgtggattttaagttttgggagattttgggtttttttggattgttttagttttgtaattataggaaaggttttttatgtttgtttgggagaagaaaattttgtagtaaatttatttttttttttgataaatgaaggtgagggtgtgggttggatatatgttttttttttgtggattttttttgttttaatatttagaattttgtagttgaaggagattttggggggttgtttgtttgatttgtaagtgaagaaatggaggtttagggaagttaagtgattggtttagggttatgtagagttatgttggaatattaagttagatagtttagtttttgttttaaagtgtttttttttttggttggggaggagggttggagggagtggattttgagtaatagtagtattggtaggggttggaagagtagttattgtatttaggtgttggagtttttggttattttttgtaggaattaggtgatttattatggtataggtttttttttgtttatttgtagttttgggggttttagggattagaggatattttggtttgagggttggggtttgagagaagagatggaagtatttttagtttggtttgtttttgtggtgttttgtaggtatatttggtagtttaggggttttagagaatttggttggtgggtgtttttattttgttgtagttgtattttgtggttagtagtttgtaggatttgggttgttgtttgtggttttgaaatagttattttttgagttgagtggggattaggtgagtagatttttatattttaattgttgtgatttttttgttttggaggttggtgggtagtttggttggtgttttatggtattttatgattggttttgttattaggtttgtgagttgtttttttttttttgggtattttgaatggtttttttgagagttttgttttgggtttttgtttttgtaggtttttgttgtttggggtgttttttttttttggaagttgggtttttttggggatttattaagaagggttttgttgagtgttgttaaattgttttatttggtttttatttgttttatttattattttattttaatttttatgttttttttttggttttaagatttgagtaggtagggtttgtgaggtattttaggttttttgatgttgttagtatttaggggattgttagtatatatgtagggagggaaggaatgaaggaagagatgatttggggagttttttagtttttatttgtaattggtatattgtgataaaatatttatggtattttattttttttatatattttttttttaaatttatttttatttgagatggagttttgttttgttatttaggttggagtgtagtagtataattttggtttattgtaatttttattttttgggtttaagtgagttttttgttttagttttttaagtagttgggattataggtgtttattattatgtttggtgaatttttgtatttttagtagagatggggttttattaagttggttaggttggttttgaatttttgattttaggtgatttgtttgtttttgttttttaaagtgttgggattataggtgtgagttattgtatttggtttttgtatatttataaaagagaatttgtttagaaaattttttagatgtatttttagggttttaaggtatagatatatgaagtttgttagtgagtagttgttgtttattttttttttttttttaatttagagtggtttgtgttttaagtggatagttgtttttttttttttggttttttgttgtttatgtttttatagaagtagggagaagaggtaggaaggtgatgtgtgattatttgttgggtgtttgtatagtgttgtttgtataggtgttattttttttatttgttattttttttgttgagtttttttttttttttgtagatgagagagtattgttttttagaggttaagaaatgggtttagagttatttagttgattagtgtgtagttagatttgaattatattttgttgatttttatgtttgtaggtttggtttgatgagatggatagttgggtggtggagattttgagattttggatggtttttaaatagggtttgtagtttttggatagggagagtttggtataaagggtttgtggagtgagttgggggagaaggtggtttagggtttttgtttttgaataaatagatggaggggttattttagtgtttttttagtttttggtgtgttgggtttttggttttgggaggagagaatggagttggtttttattttgggttgggttggtttgggtttaatttagataagttttttagtttgttatgagtgatatttttgtttgttttggtgtttttgttaaaaatatgaagggttttagaatttttattttggtttgttttttttttagatttggagtgggtttggggttgataatagttttatgttagatagtttgagtagttattagtgttattaggtttgatattgtggtttttgttttggagggaaaaataaggttttttttgggggattttttgttagtttgtgaaaataggtttggagttagttagtgtttttatgtttagatattttgtgtggtttttaaagtgtttttatgttgttagtttatatgattttttttaaaattttataagggagggtaggaagtttgagtaatagtttgttaagtatttatatagtaggtggttttattgttttttatttatagataagtaaattgagttttagggtggttattgtttgttttttaagttatttagttatttagttatggaagaggttatgattttttatattttagtgaagttgaagatttttttttttgtttttaaaaatgtttattttttagggtagtgaatatttggtgtttttgtttagtgtaagaggtgaatgtttgttatttttgtttttttttttttattagatttgattttttttttgtgatgggaatattttgtaggtagtttgttttgtttttatagattttgagaaatggggtttaaattgttggttgtgggtgggataggtgatattgtagtgaagaggtggagtatttttgtagtggggaagaaatatattttttttatttttttaggtttagtgtttgggggtttgtgaattaaatttatttaagataaattaatgagagaaaagatagatttaattatatatgtatgggattttattgaaaaatgtgatttaaaagagtaggtagaaggtggggtttgtgattggtttgaaggtagtgagttattttagttgattgtttatagttagttatagattagattttttgttttattgttttttttttttttatttgttttgttttttttgagttagagttttgtattgttgtttgggttggagtgtaatggtatgattttggtttattttaatttttgttttttgggtttaagtgatttttttgttttagttttttgagtagttaggattataggtatttattattatgtttggttaattttttgtatttttagtagagatagggttttattatgttggttaggttggttttaaatttttgattttgtgatttgtttattttggttttttaaagtggtgggattataggtatgagttattgtatttagttaattagttttaaaaaaaaaaaaaaaaaaaaaagaatttagggtttgtatattattttaataggaaaaaaggaaggggtgaaagtatatattatgggttgggtgtgatggtttatgtttgtaattttggtattttgggaggttgaggtaggtggattatttgaggttgggaatttaagattagtttggttaatatggtgaaattttgtttttattaaaaatataaaaattagttgggtatggtggtgtatatttgtaattttagttatttgggaagttgaggtaggagaattgtttgaatttatgaggtggaggttgtagtgagttgagattatattattgtattttagtttgggtaatagagtgagattgtgttttaaaaaaataaataaaaaaaaaaaagtatatattatggtaaaataaatgagtttttggaaagataaataggtttttaggagttgagatgggagatgtgaagttttgtgataatgtttttttaggtgtggtgtggaaattatttatattttttagggaagagttagttgtttttagggagtagatttgggtttgtatattattttaataggggaaatggaaggggtaaaagtatatattatgggttgggtgtaatgtgtttagtgtaggaggtagatgtggtttatggttgttgttgaaattagtgtagggtttgattgttttgtattgagtgttgaggattttggttttgtattagttatgagtttgtagttttgggatatatttgatgttggtttaaggggaaatgaggttggaggggtagggtggttggattggatgtgggtttggggttattgttgatttataaagtggttattatatgggaataatagagttggttatagattataattagtaatattatttaaaagtaaggttatatttttaataataagttatattttaagttattattaatttataaaatatattgttggtataatgatagttttttaagaaggatataaaaaggtatgttgggttgggtgtagtgatttatgtttataattttagtattttgagaggttgaggttggtggattattttaagttaggagtttgagattagtttggttaatatggtgaaattttgtttttgttaaaaatataaaaaaaaattagtttggtgtggtggtgtatgtttgtaattttagttatgggggaggttgtggtagaagaattatttaaaatttgggaggtggaggttgtagtgagttgagattgtgttattatattttagtttgggtaatagagttagattttgttttaaaaaaaaagaaaaaaaagaaaaaaagtaaaaaggtatgttgaaggtatttgtttgtggaaagttgtaatttgatgggaggtagggtgagtattttttagaaaggtggaaatgggtttttttgttatagagatttataaatatagattgaggtttgtagtttaggagatttaaaagaggtaaaggtgaataagagttaaggtttttaagttagggtttgattttgggggtgggggttatatatgatggaggatgttaggagggttttttggaggtggtgatatttattaggggggattttaggtggggtttgtgagatagtaggatttggttgaagagtgtaggttttttagataggagtgggaatttaggtttgaaaatgagttggttagattgtaggggtttttgaatgtaagggaagaattttaattttaatagaggagtttgggaagttgtttgggaaaaggagtgataaagtgggaggggttttttagtagagttttgtatgggtaggagggagtgagatgggaggtgggtgttggtaagggatgattttagtggtttaggggagtagttatagggtggaaattaattttgtggggtttgggtaggaagggattgatttgagatattgggaagaaatagttagtaggattttggtgagagggttgggggttggggaggggggtgtggagagtgggagtttgagtttttgaaaatagatagtgttttaagggggagatttgaggtaagatgtggagaggtagttgagttgggaagttggaatggaggtgtggttattttaggagattaagttagggggtgaggggatttttgggagttatttagattttagtattagggaatatggaggggagaaggaggggagaagaattagttggtgtgtgttaggtattgtttttgaggttagatggggtggggttggatattggttatgaggatttttttaagagttgggttaatagtgagatgggtggatattagatggtttgggttaagaagtaagtgggtggtgggaagttagaagttgtggtgtagatttattttgagaggttgggttgtttagatagggagaaagtttatagtttgaggaggtagataggttaaaggaagagggtttgtttgtttttgagattggggtattttgaatgtttttttaggttaagtgagaagaaattagaagaggaatatgttatttaaatgtgttgaaatagtttagtagttgtgttgttttatagaaaatgtgtagaggtttttttgttttattatgtttgtttggggatggtttttatttgggttatttagggtttttttagtttgttaatttaagggtggtaggagttgtgggtgtttttagtttttttttaaggttggtttgtgggtagaaatgtgggttgttttggggtgttatagttataaatgtatattagtttttagaattatatttttgttttttagtttttttttttgtatttttatgtagaagtgtggttgttagtttataaaggatagggagggatattgtttttggtatttgatgggaagtatttgttgtattttattggggtgttgtttaggatggattggaaaagagttggtaggaaggttgagttttgtgtttataatttggtttggtggtggttgaggagtttggtaggagtagagtgtaggatttgggaattgggggttggtgtatgtgtgtatgtatgtgtgtgtgtgtgtgtgtgtgtgttgggtgggtagggaggaagttgtgaaattatatttttttttttttgttgttgtgttgttgtgtgttttagtagtatgtgggtgttattatattttttagtaggtgttaatttttaagattgttttgggttttttttttagttggttgagttggaggtgggagttttaattgttttttgtggtttttagagtgggattttgttgtgggataggttggttaatggtgtttttttttttgtgatttttttgttgggtgggttatgaggaaggattgtgggtgttgtttatagataggtggatatgtggtaaggatattttgggattttttttttgatgttttttgaagggggtatttttttagttttgagatgagtttttgtggatgtgggaagtttattattttaagagtagtagttttggaaaatttaatatagaattttgagtaggggtgggaaggggttttgttttgtttattggttgtttggtagagttttgtataaggaagtgtttgtgttgttgtgggtggaggaatggattgagggttatatttgttttttgttgttgttgtaattgtttattataaatttagtggtttaaagtaatagaggtttttttttttatagtgttaagggttagaagttgattagttttattggattaaagttaaggtgttggtagaatttatttttgttttttttagttttgggtgggaggttttgttggagttttttggtttgtggttgtatttttttagtttttgtttttatttttttatagttttttttttttttgtagttagatttttttttgttttttttttttttttttttgagatggagttatttaggttggagtgtagtggtataattttggtttattgtagtttttgttttttgggtttaagtgatttttttgttttagttttttgagtagttgggattataggtatgtgttattatatttggttaatttttgtatttttagtagagatagggttttgttatgttggttaggttggttttgaatttttgattttaggtgatttgtttgttttagttttttaaagtgttgggattgtagttatgagttattatatttggtttgttttttttttaaaggatgtttgtgatttggggtttatttgggtaatttttttattttaatatttttagttatatttatagagtttttgttgttatatgaggtaatatagtttgggaagggagagttatttagtttattttaggggtttgtggtgtattttagggtttttttgattttaagatataaagtaagaaaataaattggtttaaggggaaaaaaggatatgttgaattttgttgttttaaatgtatatttttttattgtgttaaaatgtatagaatataaaatttgttattagtaatattgagtatatttatagtgttgtgtaattattagtattgtttagtgttagaatttttttattattttaaagggaaattttgtatttatgaaggatttattttttatttgttttttttagtttttggtagttattagaatgttttttgtttttataaatttatttttaataagtgtaattttgtgtgattttaaaataaataaatatgagtatgatgagttgtttattggaaggatatttatgtggggaggttggtgtgtggagtgtgtaggtttttggatgggtaggagttgaaggggtgtggatgtgttgtttttttttttttttgttttttttttggggttattgtttgagtatttttttttgtaaatggttttaaataatgttttagtttttatgtttgtattgttttttagttttaggattttttattaaaaaatattttaagttttagatttatttttgggaaaattttaatggttttatttttttttttgagttagttagattttatggtttgtggtgggttgtttttgagttttgagtatttgtgagttagggaagtaggataggtatatttagggaaggggaagagttgttgttagttatagtaattgatatttttggaattgtttaagagatatttagtgtgtgtttaaaatatttatttttttttttgtttgttttttgagatgaagttttgttttgttgtttaggttggagtgtagtggtgtgattttagtttattgtaattttttttttttgggtttaagtgatttttttgttttaattttttgagtggttgggattataggtatatattattatgtttggtgaatttttgtatttttagtagtgattgggttttattatgttggttaggttggttttgaatttttgattttaggtaatgtgtttgttttggttttttaaagtgttgggatgataggtgtgagttaatatatttggttatatttattttttaggagaagttttgtattttttgaaagtgaaatgtttttaggtgggtgatattgatggtgggatttgtggttttattagtgttttatgagagatgttgttgtgtgttttattaagttgtattttattgttttttaaatgtggtttgtagatatggtgttgagaatgatttgggaggtttaaattataatatggtttaaattaatagttttttgatgatttggtattattttaggattaaattgagattatttgaggatgggtgtggtggtttatgtgtgtaattttagtattttaggaggttgaggtgggtggattaattgaggtttgtagtttgagattagtttggttaatatggtgaaattttatttttattaaaaatataaaaagtagttgttggatatggtggtgtatgtttgtagttttagttatttgggaggttgaggtgggagaattgtttgaatttaggagatggaggttgtagtgagttaagattatgttattgtgttttagtttgggtgatagagtaagattttgttttttggtaattaaaaaaaaaaaaaaaaattgagattttttgagttgtattgtttagtatgatagttattggttgtatggggttatttgaatatttgaaatgtggtgattttaagtggagaggtgttgtgtgtgtgaagtgtattttgggttttagagttttagtaagggggaaagaaaagaatattaaatatttgttatttttatattgattatatgttgaattgataatattttgggttttgttaagtgaatgatattaaaattaatattatttgtttttatattttttaatgattttttttttttttttttttttttttttttttaaatatggggttttatattgttgtttaggttggagtgtagtggtatgattttggtttattgtaatttttgttttttaggtttgagtgatttttttgttttagttttttaagtagttgggattataggtggttgttattatgtttggttaatttttgtatttttagtagagatagggttttgttatgttggttaggttggttttgaatttttgattttaggtgatttgtttattttagttttttaaagtgttggtatgataggtgtgagttattgtgtttggtttgtttttatattttttattgtaggtgttggaaaatgtaaggttgtgtttgtggtttatgtgttgtttttgttggagggttggattgagggttagttgagaaggttttggggttgttttatttgaatgttgagtgtgtgttgagtggtagagaattttgagaagtgttgaaggatagaggttttgtgtgggggatgtagttttaggttggagatgttttttttgtgttttggagatttttatttggtgatagtaagaggaattattgtaagaggggtggttattttagtaaagtatttaggatgttggttttttagtttaggaatttagaggtagaggaggggaggaggttgggtttggaggagagtagggttttgggttttgggaaaagtttggggggttagaaagttgggggatagattgaggttagaggtaaagagaagaaggtttggagaggagggttaaggaagaagggttttgtttatggggagggagaggtttatggggtaggggtgtggtgggagttgtatttttgaggttttttgttgattttgatatttggttagaaaggagttttttttggtattttttgttagtggtttttggagttgttttttaggggttagtgatgagggtgttttgggttgggttgtagatagtggaaaagataggttttttttatttttagtgttggggaaattagttttttggaggaagggggagttgtattttttgagtggttgtattttttggtttagatgtgtgtgttttgttgtaattttggtgattggtgttggtggtgtttattttatggatggggaaggttaaattttatagatattgagtgataggtttagggttttggattttagtgtttgatttagaatttaggtttttgatttgttattagttttttttttatttagatgggaatagggattttgggtatgtagtttttttttagatatttttttggttttggtttggtgtttggagattagtagtagtagttttttatggttgtttattgtgagggtggggagggttgtgggattaggaggttttagggggaaagttggttatgaggagtgggaagtgatgggttagatgttagtgattgttggttggggagttgttggatgtggttggtttgtttggttagtgtggtgggtgttttggggttttagttatttttagttatgtgtgggggtgtgggatgggaaaggtaagagtgtgtggagtttagttagtatttaatatgaggttttgtgggggttgtttgagggtgtagtttttagaatttagtttttggtttttagaaggtgttattaaaggtttttttttatttgagtgaattttttttagtttttagtaagtttttggaatgagtttatttttaggtgtttttttttagtgtgggagtggttatgtttttgttgggagtgatttatttgggtttagaggttgtggtattgagatgggtttggtagattttagtgtttaggtttagtttttatagtgttagtttttttttttggggatttttttgtttgtgtttttttgggttttagtatattttaggtttgtagggagggggagaggaagagattgatttattggttaggttttttaggggttggagaggttggagaggtaggagttggattagatttgaatttagaggtttttggaggaagagtttagggtgagttgtgtttttattttttgtttttttttttttgtttttttttttttttatggttttagttagtaagtatttggggtagaggggataaatttaggtggttgtgttttagttttggttgtaggtttgaatggttttttggggtggttggttatgttttttgagagtttagttgtggtgatgtttgagtaggtaggtgggggagtatttaggaagtaggggtgttaggtagagtataaggagagagggtgtttaggttagttttaggatttggttgagaggagggggttttttatgggtattgtttttggtaagtatagggataagggtaaggatggtatggttagaggtttttgggagttttttttttttttttttttttagtagtttttttttattttttttagggattttgttatttttttttagtgtgtggtagttttttggtgttttttttgtgtttttaggttgtttttgtgttgggtttgttgttgggtgtttttatttttgtttgttttttttttttgttttttttgttttgtttttttggagtaattttttattgagtttttttttttaggtagttgaggtttttttttatttttgttttgtgttttgggaggttttttgttttgtgattataaagtttttttgattttttgtttggttttgagttatgtgatttggtgggtgggttgtggtttttggtgtgtttagtgtagtttgatgttttgttgttggggtgagttttgtttttttgttttttttagttttgtattattggtttgggggtttttaggtggtgtggttgtgaggtggattttgatggttatggtggtggtgttgggagttatgttgtttttgggttttggtttgaggttggtaggattgagtggggtttttaggagaggggtggtggggagtttgatttttatgtggggattagatttttggttttaaaatagaagaatagggttttgtgtggttatagttatttttttgtaaatatttggttaattaagttgagtggttaagtttttttgttgtttggagttttttggaatatgttttttttttgtaaggggtttttttggtttttaggagggttaggaagaaatttgaattggttattgttttttttaaaattattttgtttaagttattatttttttgggtttttgaagattggttggttggaggttggagatagttttaatgtttgaaatgttgtaattgaagttttttgtggtgttggtattgggatttagggagttgttgttatagtgtagttttggatttttggatgtgttggatatgtgtagggtgtttttgggaggagtggggagggagggtgttgttggtggggttggtttgtgtgtgttttgtttttttataatggtatgttgtgtgttggttatgtagaggtatgttagtgagtaggggttgagggatttttttaatggatttgtttttagagggtttttttatgttgggagaattttagagattaaattatgtagttaatggggtggtttttggttttaaagtagggaggggtgaggagttttgtaggtaatgttatttgtttttgaaatgttgttttagtgattttggggattgatttagtttttagtttgttgtattttatttttggtttttttttttttgtttttttatgtgaaatttgttgtgttttggttagaggtttggggaatagttttttgtttatttaagataagtttgtaattttttttttggagaaaaatatgttatttggaagtaggttgagtagtggttttttggtaggtttgtttggggttgtggagatagtatttgttggattaggatggagttggaatttggtttggattttatatgagaaaatttgttggaagaggaggaagtagaaaaaggttttattttttaataatgttgtgggttttttttttttatttattgttattttgttttgaaatttaatggggttatgtgtgtttttatgaatgttattttttttggttaatttttttggtagttttaggagtttttttttaggaaaaggaagaaggtgtttgtttagtatttagtatatgagtttttgttggaaaggtgggatttttgtttttttttgggttttttttaggttgagatgtggttaaggaaggtttgtggtgtggtttgttttttttaatgtttgtttttggagatttgagttgttgttgatttttagtttgttttttttgttttttggttatttttgtgttggggtggttgagatattattgtattggttattttgtgtttttattagtttttgtttttgtaggttgttattgtgatggtgatggggttaatttagttgtggtggggaggatttattgtgtgtgtttggggggtggtgtggggtattttgggatgagaagatgtgatttttgttttgagagttttgttttaatggaaggtgggggtatagttgtaggtagaagttattaagtattgtggttagattagtattttatgttaaaaatggttttgttggttgggtgtagtggtttatgtttgtaattttaatattttaggaggttaaggtaggtagattatttgaggttaagagtttgagattagtttggttaatatggtgaaattttgtttttattaaaaatattggttaatttgggtatggtggtgtgtgtttgtaatggtagttatttgggaggttgagataggagaattatttgaatttgggaggtggaggttgtagtgagttgagattgtgttattgtattttagtttgggtaataagagtgaaattttgttttaaaaaaaaaaaaaaaaagttttatttgggtttgggatttgttttttgaatattgggtttattgtgttttataaggatttttattttggaagttttagatttatttgggtaattagagtttttgggttgattattttttagttttggttagttttttgggttattgtatttttttaattttttgttgtgttatggttggtttaagttgtttttattagataatgtgaggtatttttataggaggggataattttgtttttaggagttttttttttttgtttttaggtttggtgtagtgtgtggtttttttgttggtgttaaaggttttaaggtttttttaagaagtttgttattattattagtagtttttgttatttggtttttttgtatatgtaagttttttttatatattttggatgtttagggtttttgttttttttttttggttgggagtgtgggaagagggttttattttaatgtttgagagtagggttaatggttagggtaagttgtgggggtttttttttgttggtttttttttgtagtttttattttaatatagagtattgatattatttgggttttgggaagatttggaggttgattattttggaggtttttagtgttttatagttattttttggggaagaggttttttgagggatttgtggtttttggttgggattttagttttagagttttgttttttggtgttgagttttgatttgtttattgagtgttagtttggtttttggataggtagggatttgtttttggagtttagtagagttttgggaagtttttttaggagggtttttgagggtggtggttatgtttagtttgttgtatgtgtgagtttgtttgatgaggaattggttgggaaggtgtgggtttaattataggtttatgagggttttttttgtttttatttaggaagtagtggagattttggtatatttagtatttgggtttgtgtttgtttagttgttggtggaattatgggagttttgttttggggtttgtagagtagtagtgggaattttttttattttagttttttttagagttggttgtttaaatttgttgttgtttagtttttttttttttttttttattaattttgggaattgtatattgtttattttattgggttttggagtgggtgtaggaagagagagtttaatatttagaggtttgggttttttgtaggtgtttgagttgttgtggtttgagttgggttttttgttggaattattatagtagatttaatgatttgtttgtaggagttgttttattttagttgattttggggttgtgggaaggggttgggttttggttttgttgggggtggggggttagtgtaaagggtttgaaaagtggtagaggtgatggtttatttgttttttttttggttggttggtttaaatgtgattggttttttttttttttttttttttttttttttttttttataaataatattaaatgtgatttgttaatgtatttatttgggtttagtagttggattatgggtagaagtattttagatttgttattttttttaagttaagggtggggaatattttttgtgagattttggtttttgagtgtttaagattgtttttggaattttaattttgggttggttttaggggattgatgttgatggagttgttgatattgatttttggtttttgtatggtttttaggaagggggttttttgttttttgttttgttgagtttggttggtagtattttttttttaggtttgtgtttttggtagggtttgttgtttttgttttgttttgtgggtgttaggttttaagtattaggtgatttggttattgaatggttattgaatagttatttttgttggtgtttttagtggaatgtgtatggatgtttttttttttttagatttttgttttttattttttagtttttgttttaggggttattataggattaggaggtatgtagatgtgggtggtatatttattgggtagatttagttttgaatttgtatgttttttttaagggggtttttagtgggtggggttgatggtgttgtttttttttttgttattagaatggatatgaggattgtgttttgttgatttatgttttgagtttttagatgttataggtgtttgtttaatgagtgtttgaatgaatggttagtattgtgtgattgtagatttttaatttttatttaaatagtttgtggtttttgtgaggttattttgagatagttttataagaatttttattttttttgtatgttttgtataaggtttttttggggggttttttagaaaaagggttaaagagtagtatttttttggggatttgaatatgattttttttggggtaggggattgttttggaagatttttggtattgttttttatgtgttatgtgattaggagggttttggggtaggatggtgttttttgtgttttgtgtgttggggttggaggaaatattgtttgtggttggtgttatttgttagttttgaagattaatgatgggttggatagtggttttattgagtgggagggagaattgttgttgtttgtagttggggggttgggtgggtgggagttgaggttagggagaatagtgtagatttggtatggagaggtttggaggaggagtagggggttttagttatttagggtgtagggatgttatatgaggagtaggtgtggtgtgtgtttttttgtgggttttttattttttggttttgttatttgtattaggttttgtggtgagagggtatagagtggaggaaggtgttgtggttagggtaggttatatgttgtgttaatggattgttgttatttgttgtttttgtggttttgttgttaggattttttagtattaggtttttattattaggtatgggttttataggtattattggttttttgaagttagggatagattttatagataatattgagtttttgtagttagggatgggtttttatggttagtattagattttagggattagtattgggtatttatagttagggataggtttttatggttagtattaggttttagggattagtattgggtatttatagttagggatgggtttttatggttagtattagattttagggattagtattgggtatttatagttagggatgggtttttatggttagtattaggttttagggattagtgttgggtttttatagttaaggataagtttttatggttaatattagattttagtgattagtattagatgtttatagttagagatgggtttttatggttagtattaggttttagggattagtgttgggattttggatgattgaaggagggtatggttgattaaagttgtaggagttagtttggttattttgaggtattaagttattattgtggttttaggggatttagatttttttatttgtttttttgaattttggaattagatatatttgggtttagtttttgtttttggggttgtgtgtttgggatggttgttttatttttttgaagtttagtgagatggggatggttgtatagggtttggtatagatggtatttgatggtatagggttatttgtttgtatttatatagttttggtttttgttttggttgtgtattgagagttttatgtttagatttttgttgagtttttaagtttttggttatgttttaggttttttgtgagaagtattattgtatggattatgttttgggattttattttgggttgggaagtttgttttatttttttaagttttttttagaggtgttttatgttttattatttttattgtttgaggggttagataggggaatttagtgtgggaggtttagaggtgttggagtagatgttaagtgagttttgtgtttatgtgttgggttttggtagatattttgaatgagttttttttttaggaaggagattggggttttagtttaagttgtggttttaaattttgtgattaagagtggagaaaaggtaagatttttttttttagttttttagaatagttgatagtggtggaaatatggggtttatattgaatttttttgtaatttgttgaagagaatttagtttatatttttaggggtggaggtttggttgatttggtagtgtgtttgtttttttggttatagtttattttggattgggtattttggtgtttttttttagtgatgtagtgaagttattatgatgtgtttagttggtgagaaagtgttttttgtaatgttttattttttttagagggtgaataagttttgtttattataaataattatttatagaatatatgaggtttaatttaattttgggttatggtagtgttttttgggtaaatttatgtgttattttagttagagtttgtgtttttataggttttttggatttattttgaaggggggttggattttttgtttgttttgatgagagggttgtaggatagtttttagtgagtttttttgagggttgtaatttttttttttggtatttttttgtttgttaggaatgttttaagtttttagtagaagtttatttattatagttgttttttattttgtttattattttttttgtttttatttatttagtagattttgtgtatagtttagtgtaggatttagggtgggaaggtgttttgggtgggttggagtaaggtttttagttagggtggggttttaaggtgggtttatagttaggattgtgatttgggaggtttttttttgttttgttttagttttggtattgttgttgtttttgtgtttagtggagatttattggttttaggttttaaaattttagtgaggtttgtagatagggaggagttttatttgagggtagagtgattgttgggtttatttgtttgttatgaattatgtggttttagatttgttatttttttttttttagagttatggttttttgtttgaaaaatggataatgatggttattatgttagggattattttgaggataaatggggatgaaattgaagaggtttagtatggaatttggatatagaagtgttaattgtgtgttattagttgtggtggttgttaaggtttaattatatggtagttatgggttgagtggtgggtgggaagtggggagtaggagtatgtaagatgggtatttttgaagtttttgatttagtgagataagtatatatttagttttaagatggagtgttttaggaaggtggagattgtaaaggttttgtggtgtaggagtgtgagttgtatttttgggttttttagaattttattagagtttagggaggaggttagtttagatataggggtaatgggagagatgggagtgagaaaatggtttggtgtttggaagtggagtttggaaaggtgggtgtggggatagaggagggttttgggggttatgggtttatgtgtttaggaggtggaggtagtgaatggggttatggttggttttatatgtggtattattagttttgttgagtttgtatttgttttttaggttttttgagtgttattattatttggtattttttggtttgatttttgttttttgtttgtttgggaagagtgagattatttgtttaaagttttttagttgtttttaattattttggttgttttttggttttgtttagggttagttgttgatttgaattgtttggtgttatttttttagatttttggggttttgttttggtattaatagttatttttatttttattatttatttgtatatttatttagtagtgttttttgggtatttatttagtaatattaaggtgttgagatgtggttgtggttaagatttgggtttggtttgtgaggattttgtagttgttatttttttagagtatagttttagttaggtatattgtggggtttagaaagagaaattaatatattgtgtttgtttattttgagttgttataaggaatagttgaggttggggggttatttgatttatggttttgtaggttgtataagtggtgttagtatttgtttggtttttggggaggttttaggaagtttttttttatggtagaaggtgaagggggagttggtatgttatatggtgagagagagaatttttagattttttttttttttgaaatggagttttgttgtgttagttaggttggagtgtagtggtataatttttggtttattgtaattttagttttttgagtagttgggattataggtgtatgttattgtgtttggttaatttttttgtatttttattagagatggggttttattatgttggttgggttggttttaaatttttaattttgtgatttatttattttggttttttaaagtgttgggattataggtgtgagttattttatttagtttttttagattttatagtaattagattttttggattttgtgattgtggggagggtattaaattatttatgagggatttatttttatgatttaagttttattttttttaggttttatttttaatattagggattatattttagtatgagatttggaggggataatgtttaaattatattatatgtgatttttttgtgtgtgtgttagtttttatatttggttaagtagtagaagttttttttttgttttttgttgagagagtggtgggggagaaatgatttagggatgggaggttggttttttgaggggttttggtgtttgtggagtgggagtgtgggaaggtttttatgttgtgtgtgttgtgttgggttggttttttatagtttattgtggtgttttttgaggattgttggggaggaaagagttaattaatttggggatttagttgttgaagttattattaaatttgagtagtttaggggtttttttttttttgggttttatgttatttagtatagtggggtttaattgaatttttttttattttttaaggtttttggttggtgtggttggggtttgggatatggggagtgagagggtttgggttttttttagatttggagtgggtttattagaaatggtttaggaaattgtgggggttatttttagtagttgggggtttttgtggttatttttttttggttttgttgagtagttttggtttttggagtttttagtaagggatgtgggggtttgttaggttagggtttttattgttgttgttatgtatagttgtattttgtatttggggagtggggtgttgagtggggtgtttgggaggtaggtttttttttgttttttttgtttagagattttggggatgagttgagtgagatttttttggtttttgattggttgtgtttttgttgttattttttattttttttaagtggaggtttatgatttttttttttatttaaaagggttatttagtgatttagtagattttagtttgtgttatttagggtttttttaaaaatttgtggggaggttgggtttggtggtttatatttttaattttagtattttgggaggttgaggtgggtggattatttgaagttaggagtttgagattagtttggttaatatggagaaattttatttttagtaaaaatataaaaaattggttgggtgtggtggtatgtgtttgtaattttagttatttgggaggttgaggtaggagaattatttaaatttaggaggtggaggttgtagtgagttgagattatattattgtattttagtttggatgatagagtgagattttgttttaaaaaaataaaaataaataaataaaaataaaaatttatggggggatttttgtgtttattggttggtgtgaggagagggtgaggagttgtagagaaggtattaggttgaggattgtttttatttttgggttatagaattgaaggaggggatatatgaaagatgtttttagatttgggttggaggttggggatatttgagggtaaggatgatgttgtttttgtttttgtttgtagaggagtgtatagggtttattagttttttgttgttgtttaagtgatagttttatggagatagaatttatatattgtgatgttgatttttttaaaatttatagtttaatggttttgttgtatttataaagtgattgtattagggttatttagagaaatagaattaatagaaggtgtgtatgtgtgtttagataaagagatttattattatgaggagttggtttattttattatagaggttggtaagtgttaagattggtagagtaaattagtaggttggagatatgggagagtttatgttgtggttttggtgtttatttgaaggtttaagatttaggagagttaatggtgttgttttagttttgagatttaggaaaagtgtatgtgttagtttgagtttgaagtaggaaaaatttgatgttttaggttgaaggtggttaagtgggaagaatttttttttatttaggttttgtgtttttttatttagatttttaggtttttgttataaaattataaagatttgattagaataaaatttgagaaaaaattttttttttttattggttttggatttattggttgggattttggaaattagattgatagagattaataggaaataagtataataatttaagtaagttttatttgatattgagtttttataaggaaatgaagatttagagaaattgttagtttgagtggtttttgttttgttttgagataaagttttattttgttgtatgtttaggttggagagtagtggtttgattatggtttattgtagttttgattttttgggtttaagttggggtttagttgttggttttgggagttgttttgaatttatttttaagttttagtttagatttttaagtagttgggattataggtatgtgttattttgtttggttaattttttattttttgtagagatagggttttattatgttgtttgggttggttttaaatttttgggtttgagtaatttttttgttttggttttttaaagtgttggggttataggtgtgagttattgtgtttggtttaggtttgaatagtttttatttgttttgtttgttttttaaatttgtttgttgtttgttttgagtagtttttttgtttattttttttgtttgttttttgtttaggttggagtgtagtggtatgatttttgtttattgtaatttttgttttttgggtttaagttatttttatgttttagttttttaagtagttgtgattataggtgtgtgttattatatttggttgatttttgtatttttagtagggatggggttttattatgttggttaggttgttttttaatttttgattttaagtgatttggttattttggttttttaaagtgttgggattgtaggtgtgagttgttgtgtttagtttaggtttgagtgtttttatgttgggtttgatgaagagtggaaagttgtgggaaattgtgatagagtaataaaagatgagttgaatagtgagtttgtgggggttttggtaagatttgtgtattggggttttttttagattttttgtttttggagatgaggttgtttttttttgttgggtgtagggagggtattttttatgtgaggggtttatgatttattttagagaaggggtaggttagtgagttttttttggatttgttattttttaaatttttttagttgaaaatatttattatgttaaggtattgtattttggagtgtgtgttttaagttttgttgtttttaattgattgggtgaggtttatttttattagagtatatagtttgttttatttaggtttttgattgtattttttttttgtttgttttgagaatatttattagtagtgtttgtggttgtagtgtttattttaagataaatttgttgggaagtattttgtttttattattatttttatattattttagtatattgattttggaaataaaagatattattttgtttatagtattttatttttagtagtggtattttttttaaaaaaaaatggtaatttttagttgggtgtggtggtttatgtttgtaattttagtatttgggaaagttgaggtaggttgattatttgaggttaggagttggagattagtttggttaatatggtgaaattttatttttattaaaaatataaaaattagttaggtgtggtggtaggtatttgtaattttagttatttgggaggttgaggttggagaattgtttgaatttgggaggtagaggttgtagtgagttgagattgtgttattgtattttagtttggatgatagagtaagattttattttaaaaaataaataaataaataaaatttaaaaaaaaatagtaatttttgattgttgaaaatgttaaattttagagaatatagtatttttataagtgatgttaatattgtttttgattagttgttggttgaagatttatttgatgaatttgatttttttagaatagatgatttagatgattttgttgttttgtttagaaataattgtaggaataatttaaaaaattttttttttttttaatttttttgttttttgagatggattttttttgttgtttaggttggagtgtagtggtatgattttggtttattgtaatttttgttttttgggtttaagtgattttttagttttagttttttgagtttagttgggattataaggtgtttgttattatatgtggttaattttttgtatttttagtagagatggtgttttattaggttgattaggttagttttgaatttttgattttaaataattggtttatgttggttttttaaagtgttgggattataggtgtgagttattatgtttggttagtttttatatttaatttttatatagagtatttagttagatttgttttagttttaaagagtgtgtttatgtaaaattaagtgagtgttggtagtgagttgaattttttaaaaggtaaaagggttaaatattaaatttatttaaaaatatttttatagatatatttagaataatgtttgattggttatttaggtgttttatagtttagtttagttgatatagaaatttttttttttttttttgagatggagttttgttttgttgtttaggttggagtgtagtggtgtgattttggtttattgtaagttttgttttttaggtttatgttatttttttgttttagttttttgagtagttgggattataggtgtttattattatatttggttaatttttttttttgtatttttagtagagatggggttttattgtggttttaattttttgattttgtgatttatttgttttagttttttaaagtgttgggattataggtatgagttattgtgtttggttgatataggaaattaattattatagttatatagttattgttattaattttagtatattttattatttttaaaagagattttgtttttattagttaatttttatttttaattttgggtttttagtttttagttattgtttatttgtttttgtttttatgaatttatttgttttagatagtttgtataagtggaattgtatagtatgtggttttggtgtttggttttttttatttggtagaatatttttaaggtttatttatattgtagtaggtgttggtgttttatttttttttatggttgaataatattttattgtggatagattatattgtgtatttttttatttgttgatggatatttgggttgtttttgttttttggtataattttgttgtgaagaattttgtagtgagtgttggtttataggtttttgtgtgaatatgtttttattttttttgggtaattgtaagattatgtggtttagttaattagtttttaagttatgtgtttgttgagggatttaggtttggtgggggtgtattgttgtgtttggttagttaggtgttgtgagtttgtgttgtagttatttttttgtgttgtgttttgaggttgttttgttggtattgggtattgtgagttttaggaggttaaagttttttttgttttattttgagtttaggttttgttttatgaattaggatgaatggatattgaattaatgtagggatgggtggggttggggtggggatgtagagtgattttgggggtttgtagttgggttttggttgttgatttttagttttttttgtttgttggagtttagaataagttagaaaggggaaatgtaaagtttgagtgttttttttgtggtagattggtaggtttgggtgggtgagttatttgtagttagttgtagtgtgagagaggaagtgggaggggagggagagggtgagtttggtgtaatttatttttggaaggaggttgggttgaggttgggggaagtgatttttatttttttgagaggatttttttttggggttaattttaaattaagggagataagatttttttgggggaggttggaagtgttggggtttttaggtgggtaggttttttagggttaatgttttggggaagttataagttattatgtttttggattgttatatatatatatatatatatatatatatatatatatatatatatatatatatgagtaaattgtaatataaatgtgtgtttatgaaagtgtttattttaaattattatatagtttgtaaagtgaaggttttggtttgtatttgggtatttattgtttagttagttggtaggtagtttgtattgtagtttgttattattttttagagatgtagttgaggagtttagttggtttggagggtttagtgggtgtagttttaggaaagtggttaggtttgggttaggtttttttttttttttagttttgggagaaattattatatgaatgtagtttttttttggagtttgggttggaagggtttgggaggggataggtttttattttaggagtttttaggttttggttgttgtttgtgttagttgtgtgagtgtgagtgagttaggggttattattgggtggaaggaagaagtgggtattttttttaggaggttattgttggagttttatagtaggttaattttaggttttgggtttttgggaggaggagaaagaagagaagtaggaggtgtggagggtaggttaggattagaaggtatatagggttggggtagtgtgggagattttgggggtttttttatttaattagttaatattatagtgtttataagaatatgttattattgtagttttattattttgttttgattttagaaggtataattgatgattttagggaatggagaatttgaggaaggttttgtaggagagggttagatgtgattgagtaaatgtgagttgtttgtaaattgtagagtgtatgtatagtattggttagttttggggttagtgtttttttggtgtttagtttggtttttgtattttttagtgtttggttgggttttgtgggggttagggttgggtttggtatattagaggatttttattaagtttttggtagtgttttagttattaaatttagtttgttagttattaaatttgttttgttggtttttgaattatttttttgttggggttggttatgttatgttaggttttttatgtaggatggtagatggatagatgttgggattaagttatttttgggttgtgagatgtttgattttttgttggtgttttagaagatgttagttttttgtggtatgttttttatgtggtgtttggggattagtggtttttaaggggtttttttgttttagtgtggggagtggtttggttaaggttttagtgtttggttggagttaggtataggtttaggtgtattggttggaggttttttgtttatgggttttgtttgttttgtgtttttggtttttattgtgttttttgtgtttttgggagagattttaggggttttgagtttagtattggggttggggagtgggtggggaagagggtggggattagggtttttggttgtagaatagttaggttttaagtttttattttattttttttttattgggtgttttattttatattgattattttttgaagaaaattttttgaattggttttttattttggttgttttaggaagtttatttatttttttgttttaatgttttgtggttttagaaggatggtggaagttggaaattatgagttttatttataggtggttatatattgaagttgtggagatgttgtgggaaaggattttggttagtgtggttggtatagagggagtggtgttattggggtagatgggaattgtggttgtttttatgttggtttgggagagatgaggggttggatgaaaggatagtagattggttatttatttatttatttatttatttatttatagtgttttattgggtgttttggatgtgtaaggttttgtgggtagtgaatgtgatagattttagatagtaattggagggttatgtgtgtaagaattgagggatttaggttgggtgtggtgttttaagtttgtaattttagtattttgggaggtagaggtgggtggattatgaggttaggagattgagattattttggttaatatggtgaaattttgtttttattaaaaatataaaaaattagttgggtgtggtggtgggtgtttgtaattttagttatttaggaggttgaggtaggagaatggtgtgaatttgggaggtagagtttgtagtgagtttagatagtgttattgtattttagtttgggtgatagagtgagattttattttaaaaaaaataaaataaaataaaataaaataaaaattgaggaatttagtgtagatgagttattttgggaaaataagtgggagttttaggaatagtatggggaagggatggttttggtagggaggatttttgtgggtagttttgttggaagagttgaaaggtagttagagaggttgtgtgtggatggaagttgaagagtaggttaggggtgtgtgttttgttaataaagattttaagtatttattgattaggtataatattatgtgttttataaataaatattttatttgatttttagtatttttatgagatagatgttattattttattttatatgtaagaatattgaggtatagagtggttaagttatttgtttagggttatatagtatgttggtggtaggtaggattttggagttataggaatttggtatattttaggtgtaatggaaattagttatggttttatagagggaaattattagattagtaaattttatatatgttttttggtgttttgaggaggagggatttggataggggtagttaatggtggtggttgtgagatgtgttgggttaatattgatgagagtttgggatggatgagtggatttggagtaatggaaatggagggtttaggtttggtttttggagatttagttgtaatagttgttggttggagaggttgtttatttagatgggggatggggtgggaggtaggtgagatgagagttttagagtttagtttggggtatggttattgggtttaagatgtttttagatgttggggtttgatagtgatagtggttgtagatatttaggatttagtagagggtttggtatagtggggtttagggatatgtttgtgagttaggttggtatttaagtgtgaatttggataaagaaggtggtattgttggtattgaatgtttaggggttgggtgaagttagttagggagaggggtttttaaggtattaggattgattttgtgggtgagggtggaggaggagatggtagaggttgagagaatagttagagataggaggaaggttagtagagttatgtatagaagtttggagaagatttgaggaaaggaagggttgggtggttgttattttttgtagttaggaggtaagggtgatttttgtgtgttttattttttagaggattggtggttttatttggttagaattttaagtttagagatgtatttgagttttatgttatggtgtaggtagtaggagttatggagtaggtttgtggggttatggtttgtttgttgttttttggtgtttttattttgagtttaggggttgtttggatgttttgtgttgtatttttttaggtggtgttttagagaggatgaaagtggttattttaaggtgtgattaggtagtggtttatgtatattgtttttttttggggagagtttgggatggaagggtatgtgtgtgtttttgagattttttgaataggttttatgtatttatttatttattttattatttatttatttatttatttatttatttatttatgtatttatttatttatttatttatttatttatttgttaatttatttatttatttatttatttatttatttatttatttatttatagttatttatttatttatttatttatttatttatttatttatttatttatttatttatttgtttatttatttatttatttatttatttatttatttatttatttatttatttatgtatttatttatttatttatttatttatttatttatttatttatttatttatttatttatttatttatttatttatttatttatttatttatttatttatttatttatttatttatttatttgtttatttatttatttatttatttatttatttatttatttatttatttatttaattatttatttatttatttatttatttattatttgtttatttatttatttatttatttatgtatttatttatttatttatttatttatttatttgtttatttatttatttatttatttatttatttatttatttatttatttatttatttatttatttttttatttatttatttatttatttatttatttatttatttatttatttatttatttgtttatttatttatttatgtatttatttatttatttatttatttatttatttatttatttatttatttgtttatttatttatttatttatttatttatttatttatttatttatttatttatttatttatttatttatttatttatttatttattaatttatttatttatttatttatttatttatttatttatttagttatttatttatttgtttatttatttgttaatttatttatttatttgtttgtttatttatttatttatttatttatttatttgtttatttatttatttatttatttatttatttatatatttatatatttatttatttatttaattatttatttttatttttattttagaaagtatttgaagttgttggggtgtgtatttggaaaatgtgttataagtttttataggtttttttttggtttttttatttttttgattggttttttttttggatatgtaggattttgagtagtttttttgggaggtgggtgtagtttaggtaggttgtttgtaaagttaggattgagggagttatatttaaggtattgtgggtttttaaggtgatggtattgtgggtttattgtttttagatttttttaatttttaggtttttgagtaggaggatttttggggtagggtttggagatgggaagagaaaataattttagttttttaatttttgttagtttaggtgggtgttgtatggattgggggtatttggaatagttggtttttttattttttttttttatttttttagtttttttggttataattagatagttgtgtgtgatgttttttttttttttgaaggggttatttagttaggtttttatttatggtttaggaatgtgtttttttttgtttgttttttatttttaagtaggttgtgtttttagttttttgttgtttttgaagggtttgggtatggggtagtttttgtagtatttttagggtttgagttgatttgtatagtagaagggaattgggggaaagttttttttttatttagtatttggtagggggttattttgttgtattttagagatttttgtttaagttttgttattttagatgattttataagttgggggaggtggagttttagtttttatagtttttgttgttgttttattgttgagttttgttgtgtatttgttgataggtttgttgatagtagaaggggttggagagagggaagttttgggttttgttttttttaatttttgtttaggggatatttttgataagaggaaattttagtttgtgatagatggttagtgtttatttatttatgggggaatttttttttttttttgtaagtttgtagatttgttaggaattaaaggaatttttggttgataggttattgtggatatggttggagggttggtatgggttggattttggggttgttttgaggtaggggttgtttttgttggaaggttttttggggtggggaaggtattagggttattttttgattttttttttgtagtggatttattttagagtttgagataaggtaagggggtagtagaaaatagaatataaaatagttttttttattatatattgtattagaagttagaggatttatttttggtttgttttttttgtagtttaagttttgagagtggttttttaggaagtgaatggtgatggtttgtaggttagagtttgttttggtttaagattgatgttttaataggttgtggagtttgggtgaaaaaatttaggttagggaggtggtgggttgtaaatgaaagaatagaggagggttttttttagaaagtggtgggtggtgtgaggagtttttggattttgtttaaatttgattttattgattggggttaattgaaattgtgttggtagaaaggtaaaattgtttgagatttttttttttataatagaggagaggtttgtttgaaagggtttggtgagggaaaagttggaggaattttggttggtagtaaaagtggggatttttgttttttgttttgggggtgttttggtttttgaatgaatgaaagaggaggttggatggagatagatttatattatttgttttttttaggttttgtaaaggagtatatagggtttttgttggtttttttattttgttagttattaagaaggagaaaatattaataggggaattgtaaagttgtagttttgtttaagttttatagtggaaattggaaagagttttagtttggagaaaaatgtagttttttgtttttgtaaatttgtgtttttttttgggaggttagagttattgtgtttgatttttaagtagggttttagagtgttttaggaggggaaggtagagttttagatttttggtattttaggttttaattaggttttgaggagatgttttttgttttatataaagtgtgaagtgtaatttgatttggagttagttaataaattagatgagttgtgtgtattttaaaaatttagtttttgattttttatttatatatatttgtataatttggttatttatatttagtgtttttatttttagaagagaataggaagtttttagtgatatttatggagtgtttgtagtagtttgggtaggttagtaggaatataatgtagtgaaaagtagagttgagatgggaaaatattttgtttttagagttttttagggatgatattttttattgtttttgtttatttgttttggagtttattttgtaaatagtaatttgtttttatttgagagtttttttttgttggagtttagggatggagagtagttggttttagttttttttttttatttttttgttttttagatttattttttattttgaataattgtttttaatttgtttttttttttttttagttgtagaatttagaattttgtgtgtgtggttaaaagtttagagagtgttgtaggtaatgttgagataattttattaaattttgtaagtttttattatattaagtttgtttgttttttttaatttttattttattttattttattttatagggatggggttttgttatgttgtttaggttggttttgaatttttgggtttaaatgatttttttgttttggttttttagagtgttaagttatttttttaattgggatttatgggtttagggattttttgatgaattgtttaaaatatgtgtgtgtttgtttgtttgtttttaatgtatatttttttagggagagtttttattttttattagaggtttgtggtatatatatgttttgtattattgtattagattgtgaattttttatatgttaaagattgttttaaatttgtttggaagttttggttaataaatatttaaataaatgaattttaaatttttatgtgttattattgtttttattttgattatttttaagtttgtagtgttatttttttgttattgtgaagtagatatttaataaatatttgttaaatgaattaatgttatggttttggtttattaggattttaggattattgtttattattattgtttatagtttttttattattttgttttagagtagttttttttttgaggtttgtttatttttgtatgtgtgtttagtttttagttttgttgttttattatttttttttttttatttgtattttttgaattgttaatagttaataatagtttttttttttatttatttatttatatttgaagtgagaagttattattgaggtttttgtggattttgttagtttaatttggggtggttttttggaggtggagtttttagatgagggatggatattttggtgtttgttgggtagatttatttgggagttttggtaggggttttagggtagttttgtttttttattttggttgtgggatttttggtgtattagggttttttaagtaagtatttgtgttttgggagagttataggtaggtttgagagggtttttggaatttgggatttttagtttggtttagtagttggtattattattttttttgtaagggaagttatggaaattaagatgttaatgtgttttgataggtttggggtggttttaagttttgggaagagttttggtaattttttttggttggtgggtagaatttttttttggtagtttagggttttgtttttagttttttgggggagagtaattgagggaggagttggaggttaaggttttagtgttgagttgtttgtattgtagttgtattttttgggttttggttgtaggaattttatatttttttagtttttttatggtttttgaagatttggtttggggagggggttagtagtttggggtttatttatttggttttaaattttggttttattgtttatttgttttgtgatttttataattgataaaagtttttttggttttggtttttttatttgtgaaatgggataataatagtggttattttataggattgtgtgatgatttattagttataatagtttttgagtagtgtttagagtaatatttggggtttggtgtagtggtttatgtttataattttagtattttgggaggttaaggtgggaggattgtttgaggttaggagtttgaaattagtttgattaatattagtgagatttattttttaaaaaaaaaaattagagtaatgtttggtatagagagtttttagtaaattttggttgttgtgatgagttttgtttttttatttgtttatttatttattagattttttgttggggtttgttgtgagttttatgttgttttgaagaaagttgggttggggtgagtgtgatggatgaggtgtttggttttataaattttgtgtgggggggttgtggtgagaggaaattgtatatattattatttagttattattgtggggagattgtttggatgtagagagtaggttttgtgtgggagtggggagggtaagttttggttgtgaggtagggtttttttaggatttagtagggatttgaaggattttgtaggtatttagggagataggagaggaggagggagtagttttggttggatattgtttttttagtattgtttgtattagggatttatttagttttaagaagtttttttgtgggggatagggagtatttgttagtttataggatttgaagtgtttttatgggtttaagtttttgggaaggtttgtaggtggttgtagggttgttgtaggggtgttggttttagggtttggatttaggggagtttgtagagggagggtagttggaggttgttttagtgtgtattgttatgaggtaaagtaaggagattgttgggtttatgttgggttggggtggatggaggtaaggaagtttttgttggggtaagggtattagttgtagatgttggtagtttttttttggatatgggtttggaaggttgatagggtgtggtgagtgttattggtttttttgttgtggtttggttagtggttttataggtttttgtgggtaggaggaggatgattttgtattttgtttggttattattggtagtgatagataaggtgtgtggggatgtggttattttggtttgtgttttgagagttaggtgtgggttgggtttggggaagataggggaatggtattgatttgattttgagtattttgttttggggtgtaggtttggttgttatttttttggagttgggaatggtattgggtggtggtttagggttttttgttttagtggtattatttttgtatttggttagtaaggttgatgggatttgtgtggatatttttgggatgtagattaggtagtatgatatatagggaggggtaggtagagaagggtggtttttgggttttggtttttaagttaggttttgtaagtttgttgtgttaagtttttttttggtattaggttaggtgggttagggttagttttggggttgtgatgagtgtgagtgtttttaaagtgtgttatgtttaatagttgttttttttttgggtattgttttttagttagatattttatagtttttgttttagttatagatagtaatttgatttttttatttttggtaggttttggggttggggtaagaatttgttattaagtgtagatgtttttagagggtgttggtttagggttgtgtggattatagtttttttatttttgttttagatttatttgtaattttggagaaaagatggtttagtggatgtttgtggggaggagggagttggtttttaggatgagtagatttgggggtagtttttattatgggattggtgatttattgttattagtgttagtgaatggtagaggggttttggtataaggtttgggtttagaatgggaatttgtagagaaattgttaaggttttttgttatttgatatttttgtttggttgttattttagaaatatttttgttgtaagaagatgggggagtttgtttggggtatggtttggtgatattaatttgagaattttaggtttaagtgttggtttttgggttttagttgttttttgagttgtaaagttggtttttgggtatttgtggaaaatattggattttttattttattttattttatattttgggatatatgtgtagaatgtgtaggtttgttatataggaatataagtgttatagtggtttgttgtatttattggattttttaatttagttttattagaaatgattgttttttttttttttttttgttttttttttttttttttttttttttttttttttttttgtttttttttttttttttttttttttttttttttttttttttttgtttttatggggatataatttttatattatattatttgttgatttagaaagtatagttgagtggtatttttttataattttttataagtattatttttaattttagaatgttttttttattttaaaaggaaatgttatttttggtatatagttatttttttttttttagtttttggaaattattaatttgtgttttgtttttatagatgtatttattttgaatatatgattagaattttaaaagatgtgattttttgtgtttggttttttgtagttggaatgtttttagagtttatttgtgttggtgtatgtttgtgtttttttatggttgagaaatagtttgttgtgttgatttagtatgttgggtttttttatgtatttgttggtggatgtgttagttatttttggagttgggtgtgttgtgttatttatgggttgtattaggagttggggatattattgagtaagttatagttttgggtatttaggagtttgtagagtaggagttgggagggaggttaggaggtgtatggtttgtttgttaggttggagagatttgtaaaaagttattttgagttagaaattagagtttgaggtttttgatttttagttgtggagttgggagggaagttttgtattttgttttgattgtggggtgatgtgttagttattgtttaaattagaatttttttgagagttgatgtgggtattgttgataattagtttggatatttgaaagaatggaaagtagggatttagatagatttttgtataattgtgtttgtagtagggtgaggtttggaggtgtgatggggattttaatggggtagttgttgttttgttggagtttatggtttttggggggggttataggtgttaattgtatattatataagtaggagtgtgaaattttagggttgttaaatttagtgagggttttgtgttggtttggttatttatagtggtattttaggaaaaaaaattattttatggattttagtttttttattagtaaagagtaggttggattggaattttgtattatttagtatagttgttatttatgaaatgtggttatttaaatttaaataaaaatagaaattttgttttttagttggattagtttagtgttaagtgtttagaagttatttgtgaatatattgtggtaattttttaaaaaatgaaaattagaattattgtagtattttataattttatttttgggtgtggatttaaaagaatgtatagtattttaaagagttagagatatttgtatatttatatttatagtggttttgtttatagtagttagtgggtagaaataatttgaatgtttgtggttaaatgaatggagaaattaaaggtgggataggttgggtgtggtggtttatgtttgtaattttagtattttgggaggttgaggtgggtggattatttgaggttataagtttaagattagtttgattagtatggagaaattttgtttttattaaaataaaattagttgggtatggtggtgggtgtttgtaattttagttatttgagaggttgaggtaggagaattgtttgaatttggggaggtagaggttttggtgagttgagattgtgttattgtattttagtttgggtaataagagtaaaattttgtttaaaaaaaaaaaaaaaaagggtggaatatataaggaatttgatttagttgtaaagaggaagttaggatatttgtaatagtaagggtgaattttttgggtattatgttaagtgaaataatttggttataaaaggataattttgtaggattttatttatattaggtttgtagagtagttagatttagaaaaatagtagaatggaggttgttagaggtttgggggatggggttggggagttgtttaatgaggatagtttgttttataagatgaaaaagttttggagatttgttatataataatgtgaatgtatttaatattattggattgtatattttaaaatagtgattgtggtaaatgttatgataattaaaaggaaaagttatgtggttagtggttattatgttgagtagtgtaggttttggatggtgttgtggttatagataatggagtgggtgatttttattattgtttttagttgtttgagtattatggtgttttggggttaggatgaaagtgtttttgggtatgggggtttttgttttttttatttgggagttttgaaggtagattttaaagtttatttggttaggtaggagagtgaggtgggtttttgtattgttttttgtgtgtgtgtttgtttgtgggttagttggggtttgtaaggttgttttttgagggaggggttgtaggaatggtttttatttgtgtagaaggtaagttattgttttatgttaatggtaaagatggggtttggttgtgttgtattattattttttaagtggggtttttggtgggtaggatgtttggtttgatttgagtttttgtagtgagtgttggtgtttgtggagggatttagttgtagttgagttggttttttttttgttttgggttttaggggtgttgggggtgagaaaggagagtttagggggtagtgtttttttttaggttttgttggggagggttgagggatgttggggggaggtgggggtgggtaggggttggttttagttttaggtaaaatggtttttagatttataggtagatggaagtgatttttggttatgtgggtggggattgaattgttgttttgtaaggtaaggttttatgtttggttttaggaagtggttttaaagttatatggtttatggttagatgtagggttgtgtttttgtttatttaaaggttttggaagtttaggggagagtatttttgaagggggagtaggagtaggagtaaagttttgaaggtttttaggttgtgtggtttgggtgggggttatgtgggggtatagagagaggagttttggtttttaggtttgtttgtgggtattgtttttagtagtggagatgtgtggatttttttttggtattttttaataaggaattatattgtttttttgtttttttaattttataagataggaatttttgtgttttgtggaggttgagaagatggggaggtgtttgtgaggataaattagtttttagtttttggtttttagagttttttttttttttatttttgatgttttaggtttggggagtttttttttgatattttttgattgttttagtgaaataggttgagagggatggtttgaattggttggggatgtaggttgtagttagggggtttagtgggtattttttgagtttggtttttgttttgtaagtggaagggtagttgaattgaagttttttattgttttttttggtttggaagtttgttttttattttttgggtagagtgaggagtgggtgtgggttgggagggttgttttttgtttgggagggttgtttatttgtttgttatgggggatgagttttttgtagttttttgtgttgtggttttggtttttatgttggttttatttttttgtggttgtttttgttgggtgtttattggttttagggaaaagttattttttttttggaggattggtgggaggggttttgtttgggagtgtgttgtgtggtttttgttttagtgtaggatgtttgaggttagattttttttgggaggtaggatggggtaaaagtttttttgtaggtagagtagggtttggatgggtttaagtagggatgggggtatagaatagtagttgtttagtttgtgtgggagttgagggttattaagggtagttttagtttgtggggattagtagaggtattatttttgtgattagtgagttgtttgtatttgtatgtgtatgtattagtgagtgtggtgagtttgaggtgtgttgggatttggtttgtgtattagttagttttgatgggaattagttttattttgggtatttttggaattttattgtgtgggagtatttgggtttttagtaggtgttttttgggtgtttgtttttagttttaggtttttgatttgtgtgtggtgttttaatagtagttaggagtagggttattgaagggatttatagatagaagaggttttagtgattttgggaagtttagttttatgtgttttatatatttaagagtaaaatttggttttggtttgtgggtgtgtagtttgtgggtgttggttaggtatataagatggttgtttgggttagtttagggggaggtagatgtggtgtaggggttttttttttttatgagtttaggaatagttttgtatttaggtatttgttttgtatttagtattttttttttttttaggattgttggtttgttttatgggattgaatatataattttatggggattgatgttggttttattttttttttttataagattatttatggggatgtgggaggtggggatatatgttggttttatttttgttttttataagattattttttttgtgttttggtttgtggattggtttttaaggtttttgagtggtagtaggtggtatagtttatttgagtagaggtgaaggagagggttaggtttatttgggtggtttgaggtagtgtggagggttaggagaggagagtattttttatttttgtttgagtagttttttagggtatggagataggagtttagggttagttttgttttggagtgtagggggtttttagtttggtatagtttttagaagaggagatgaaaaagtttggttttgggagtttggggatggagttttgttggggaggtagtgtggttgtaggatggtagttttttagaggatattatggttagggatatttatttgggggaatttttaggggttgtttgggtaagttgtttagtttttttgagttttagtgttttagtttttttatttaaggatgggtgtgataattatttggtaggtgtttgtgtgtgagtttttgttttgttttaatttttttgttgttttttttttagttattgaggtggtttttagttgtgttggtgatatggttgatatttttagagatgttgggtttaagtaggtgtttgtattatggaatgagaaggttttggtggattttggttatgtggggattgattttattttggagtagatgtgttggaaggttatgaagtagggttttgagtttaatattatggtggttggtgagtttttattttgtatgttatttaattaatgttggaaattagttttagtttttagggtggtttataagtttttgggtttggtttttttttttgtaaaatggggtagtaattttgattttaaggatggattgttagtgatattgtgtgtgtatgtatgtgtttgggaggagtttatagtttttagtggttttttagaggggtttgttttgtatatttagggtttttgagatgattttggggagtttaggttggtttggagtaggttttgatgagtggttgttgtttttgagtaatgatgttagtttgtgtagagggttttgtggtagttgtttttttattgttgttttagtttggttttttaggttttttattgtattttattgtattttggttagaggttttttagtagtttagttttagttttgttttggaattggggttttgtggtttttatattttttggtggttttggagagttggaggttattatgggaggttgttgattagtatgatttgggtagggtgagggggttaggttggagtttatagtgggttgtttgttgtttttaaagttttttaggttttatttaaattttatagggattttgtgaagggggtgttttgttttttaggtagaagtgaggtttagggaaggttgttaaggttttttagtttatagggtagagaattgtagttattgttttgatttttagaattgtgttttgtttattttatggggtttagggaggggtttggggaagtgtttttgttaggttatattttaaataaaggtgagtttgtggggtttttgtaaggtgtttgggtattttttaggttgggtttgtttttttgatttttgttagttgtgtatgttttttttgtttagttttgtggatgtaaatttatatttgttagtttgatatttttttttttttttttgtattgatttgggttttggtttttttggggttttggtgttttttttgttttttgtagttttatgggatttggttgtttatggttttgttgtgtttatagttgtttggaagttggtagtttgttttaagggagggtggaggtgtggggtttttttttatggtttttattttgttttgtttgttgtgggggatgtgtttgtattttgaggatttagggttgttttttgggaagatggttggagagaaagagaggggagaggtttaaaggtagtggttaggttgggatttatttttgtgggttatggaggggttgttttgttttttagttagggatagggtgagaaggatttgggaatttttgtgttttagttatggtataggtttttttttggagttttggttttaaggagagggagaggtagtttagtagtttttgttttttgtggttgttattgtgatagttttgttttttgggaatggtgtgtaggaggttattttatttgtttgggtttttttgtttttttaattttgagaagaatagtggttttgattttttataaaattatttttttttagggatgttgagtgaggaataagatgtggggtagttttgtttttttttttttttttttttatggtagttgtgtttatttgtagaggtgtaggtaaggtggaggggtatttgtttggaggtttatagattttggggagaattttagttttgttttaatttagtggggtgaggtttgtgtgtttttttttgggttttttttttgtgagttttagtttttttgtttataaaatgggattattttataaagtgagattaagtgagttaggttttgggtagggtttttaataggttgtggttgtttgagaatttgtagtagtggtgatggtggttgtggtgatgaggatgatgggggtggtaatgatggtgatgatgatggggtgatggtgttagtggagatgatggggatgatggtgatggtggtggtgatagtggtgggatggtagtggtgatgtgggtgatggtgattgtgatggtggtggtggtggtgatggaggtgatggtgatagtgattatgagggtgatggggatggtggtggtggtgatggtgatagtggtgggatggtagtgatgatgtgggtgatggtgatggtggtgatggtggtggtggtgattgtggtggtggtggtgatgatggtggtgatgatggtgattgtggtgatggtgatggtggtaattgtgatggtggtggtggtgatggtggtgatgatggtgattgtggtgatggtggttatgatggtggtaattgtgatggtggtggtgatggtggtgatggggatgatgatggtgattgtgatgggggtggtggtggtgattgtgatggtggtgatgtgggtggtggtggtgattgtgatggtggtgatgtgggtggtggtggtgattgtgatggtggtggtggtggttgtgatggtggtgatgtgggtggtggtggtgattgtgatggtggtgatgtgggtggtggtggtgattgtgatggtggtggtgatggtggttgtgatggtggtgatgtgggtggtggtgattgtgatggttgtgattgtgatggtggtggtggtgatggtgatgatggtggtgattgtgatggtggtgatgggagtgatgttggtgattgtggtggtgaagggggtgatggtggtgattgtgatggtggtgaagggggtgatggtggtgattgtgatggtggtgaagggggtgatggtggtgattgtggtggtggtaatggtgatggtggtaaaggggtgatggtggtgattgtggtgatgtgggtggtggtggtgatgtgggtggtggtggtgattgtgatgggggtgatgatggtaatgtgggtgatggtgattgtggtggtggtggtgatggtgatgattgtgatggtggtgaagggggtgatggtggtgattgtgatggtggtgattgtgatggtgatgtgggtgatggtggtgttgatgggggtgatgatgttagtagtggtggtgatagtgatggggatgatggtggtgttgatggtgatagtggtgggatggtagtggtgatgtggttgatgatggtgttggtgttgatgattgtgatgatagtggtggtggtgatgagggtgatggaagtggtgatgatggtgggagtgatgggatgatggtaatagtagtgatggtattgtgatgatggtgttgatggggatggtggtgatgataagggtgatgatgatggtgatgataataataaaagtaataataataaagggatatattttgtagtattttagttggtattttttagatttaaggtgttgtggttggaatattgatataatttttgatttgaggttggttaggatatagatttggtggatagagagagatggatgaggagtgtttgtttttgggttattaaatagtttaggttagggatttttagtattagtttttgtttttttaggagtttatattttttttagaaaggtgttattaaagttagaatattagtgtaatttagggtgttttttgtgttgtgtttttttgagatagggttttattgttgtttaggttggagtgtagtggtatggttttgatttattgtagtttttatattttgggtttaagtgatttttgtgttttaggtatgtgttattatatttggttaatttttgtgttttttggtagagatagggttttattatgttggttaagttggttttgaatttttgattttaagtaatttattttttttagttttttaaagtgttgggattataggtgtgagttattttgtttggttgatttttgtttttttaaaagatagggtttttgttattttggagtggtaatgattttagtttattgtagttttgtatttttgggtttgagtaatttttttattttagttttttgtgtagttgggattataggtgtttgttattatatttagttaatgtttatattttgatgtagagatagggtttttttgtgttgtttaggttggttttgaatttttgggtttaagtaatttttttgttttagttttttaaagtgttgggattataggtatgagttattatatttggtttagggtattttttttggtgtgttgttagtgtagtttaaggtagttttgtgtagggtaaagtaatggggttttgagtttggaggggtgtgtgtgtgtgtgtgtgtgtgtgtgtgtgtgtgtgtgtatgtgtgtgtgtgttatatgtgatttgtttgtgtgtgttgtgagagttgtgtgtgaggtatgtgtaagaggtatgtttgaggtgagttgtgtgtgtgttgtgagttgtgtatgtgaagtgtgtgtgttgtgaggtgtgtgtatgaggtgtatgtgagttgtgtgtgttgtgttgtatatgaatgttatttttttatttttgtttgttttagttatttgtggattggttgtttgtatatatggttattgttttttgagtggtattattttgtaggttagtgttttttagtatatggttttatagattttatgggatatgtgtgagtttgtttgatgtttatattagttttatgggggaaggattgtttattttattttgtagattaggaaattgagatatggtgaggttaggtgatttgtttaggttttggttggttagggaggagtagtttgaatatttgggttttggttgtaattattttggtgaattgtaggaattttggttatttggtgtattttgggtagttttgggtttttttgttagtttggtttttgttttgtttaaaatttgagttattaggagattttttgtttagaaagtataaggggtataagagatgttgatttttttaggtttggtttattttttaggagaggattgtggtttgggttgtgttggtattagagtttggttgtgtgggtttatatagttattggatatttggtttgagggtgaagtttttgggggttgtttggtagggatattgttgggaggtagtttaggtattgttgaattttagattggagagttttgtgtttgggtgggaggggttttatgtgtagattttgttggtttttttggagagatttttgattggttttttattttttttttagggtagagtggtttgggtaaatttattttaattaatattttttttaaatttaaaattagttggaagttggtgtagtttattttagaggagtgtatttttaagattattgagattaagtttattatgtatggttagtggttgggagtgggttgggggtgtaggatgtttttgtttttttggagtataggggttgggggttaagattattatatatagttagtggttaggggtgggttgggggtgtaggatttttttgtttttttggagtatagagtggggggttaagattattatatatagttagtggttgggagtgggttggggatgtaggatgtttttgtttttttggagtataggggttgggggttaagattattatatatggttagtggttggggatgggttggggatgtgggatatttatgtttttttggagtattggtgtggtgtgagggtgtttgagttaggtaattttaggtttttaagatggggatttgttgtgtttattatttttagtatgttgagtatgttggggttttggttgtgatgggttagtgttttggatttttgtgggttttgttatattgagttttttatagataattgagttttttattaaaagtttgataggtaaggggtttttaggggaattgttattggtttgtgttggagttggttgaggaaggttattaattttttggtgtttttttggttgttattgttgtttatttggggttgttttggggttagttaggtgtggggtgtttgtgagggttttttgttttttttttgattttgtgtttgtggttttgtgtagatattgaggagaaaggtgtttggatgaagttgatagtgattgatatattagggtttggggattatattaataatgagaattggtgaggtttttttagggggaggagtattagtgggggttttagggttttttggattttatttagagttagttttagaggttttttggtttgtgggggtgtagggtttattttttgggatttgatatgttgttaaagttgtatgttttaggggtttgaaaattttggattaaagtagaattatttggggaattttgttgtttttaatttattatttgaggttagtttggggaggttggtttgggaggttgagggtaaggttgtggtatttttgtttagtaagttagattttttagggtatgtattttattggaaggtggggtgttgggttttgagttttgggaatgtatgatttgtttggggagggtattttatgtgtttgttgatttgtttttattttttatgtagttggtagtttattatgaagtttattaatgattagtatgagaaatatttgtaggaggaggttaatattaattgtaagaagtgtattttggatatttgtgtttattgttgtttttattttatttttgttattggttatttgtatgtttttgtagtgttggtgtttttatgttgggtgttttgggttttttttgttttttgggattgtaagatggtgttgtttgttttgttgttgggtgtagaggggttgagttaggggttatggttgttagttatgaagttgggggtgtgttatgtttgtatttttaaagttttatattgatttttatgtaagtgttttgtttagtttttattttttagttgtgttttggggagttgagggttaggtaggttttgggttgttttggagtttggtggtttgtgttttgtttttttaggttaggttttggtaggtggagtgggagtttttagttaagtatttgtagtggtgattgatttttttatttgggttttgttttatgggattttttagagggtttggtgtgtttttagatgggaagtatagagattagtgttggttttttttagggttggatggggttgttgttggtgttggtgagagttttttttttttgttggttttgtttgtatttgatgttgtttttagagattagtaagggtgggaggttgtatgtattttggtaggtggattttttatggttttatggattttttgtttttagttttttgtgtattttttgttagatatttgtggtttattttgagttagggttgggaggaggaggattagaggttagtaggagtggttggtggaggtagttgtgggtggtttgtttgtatgggtgggtggagaaggttttttgtatttgttgttttagatgtatttttttgggtggaggaagtttaggggtttggggaaattatattttgtgggtattaggtgtaggaaggagtttggttggtgggtagtgggttttatttagagtttgtgggaaaatttaagttggagtttttgagtttattttttggtattattttttgtgggttagtaggagttaggggtagggggttagtttgttgtttatgggttttttttgaattgaatatttgtttttttaggtagaatggtttatttgtggttttgtggtagttgttttagttgttttaagttttgttttagttgaggttgatggtaggaggtagaagttttttttgatgttagttgggtaagttgagggtgggtgggtggtttgtggtatttttgttattttttagtattgattttttggttgggattttagttaggtatgttgtttggttttgtttaaggtgtttagttttatggggtaggggtgggttttggttatttttgtttaaatttttgtttggagtgggtttttttttagttatgtgtgtgattgatttatttttattgtgggaaaagtttggttttagaattggggaagatggtgttttagttttagggttttgttagtttttgttatttatagttttttttatattagattttaggtttattggggttaagtaggtaaggggagtagtttgtttggtgtaggggagtagtttgtttggtgtaggggtattgtatattggtgttagtttttattttttttgtttttttttttttagttaaagttttatagtaagatggttgttgagttaatgatagtttttttgtgtggatatgtaggggtgtggttgggattttagaatttatggatgagggtgtttggagttggttttggtttgtttggtttgtgtagtggtgttatttgtgtttgggatatatttgtgttttttttttgttttatatttatagtgtggttgatttggtttggggttttgtttttgttagtagggatttttgtgagttttgagttagtatttgagagtgttgatatttgtttgggggtgggtgtttttttattgttttgtttttttagatgagttttatgtatatttttttgttttagttttaggtttttggatattgagtttatgaaatgtttgagtaaggtggttaatattgtttttgttattgttaaggtggatatatttattttggaggagagggtttattttaaatagtgggtagggttttatttttatttgttttagtttttttgtgtaatttggagatgttgtaggtttggtaggggttattttgtttaaaggagttatattgttagggagattgaattgttggttattttttttagtgggtggttggtttggtggtttttggtttaggtggttgttgggggttgtttttgagatggtttttttagtttttttatattttaaaagtagttttgtgggagtgttaattttttagtagagtttttgaggggggttttggagaagatttggattaggtagatggtgaattttttttttagggagtgaggttgagtaggggttgtgtgatatggtttattttgttttatgttttttttttttttttttgagaaagggtttggtttagttgttaaggttgtaatgtagtggtataattatggtttattgtagtttttattttttaggtttagtttttgagtagttggaattatagatgtatattattatgtttggttaatttttgtatttttagtagagatgaggttttgttatgttgtttaggttggtttttaatttttgggtttaagggatttttttgttttagttttttaaagtgttggggttataggtatgagttattttattttgttttgtttggtttttattagatggaagagaagttgggttaggtgtggtggtttatgtttgtaattttagtattttgggaggttgaggtgggtagattatttgaggttaggagtttgaggttaatatgatgaaattttatttttattaaaaatataaaaatattagttgggtatggtggtgggtgtttgtagttttagttatttgggaggttgaggtaggagaattttttgaatttgggaggtggaggttttagtgagttgagattgagttattgtattttagtttgggtgatagagtgagattttattttaaaaaaaaaaaaaaaaaaaaaagttttaggagggatggtttttgttatttttttttttgttattgtttgaggtttttgttgtgggatagggaggggtatttaagtaagagggtagttttgggtttttttttttgatagggtagtatattagagttatatggggtgttttttaaaatgaaattgaggtgtttgggttgtggtattatatttgttttggtgggtgtgggtggggtttgtaatttattttgttttggggttaggtgttagggatttttttagtatgtgtaggggaagatagtttatataaagtgggtgtgtttgttggaggttatatatgggttgtggtttgtgtttgggtaggtgagtagttgtttattgggatgtttttgttgtatgtatttatgttgggttgttggtagggagttgagaggttattgtaggtggggtttttgttggaattggggattgtgatgagggttttttaggaagggttttaggaggggaggttttggtaattttgagtatttttttggggttgtgatgagtaggagaagagaggtgggaggtgtttaggatgatgattttaagtttttggggagttgtagtgttgtttaggatagtaggtgtatttgtagttgttttttttttttttaggaggtataggagttggaggtgattggtgttatagttttttagagtttgtttttgaatttgagtttggggtagtatatagtgtggaggttatgtggtaaatattagtgggtgggtagagtttgttatagggatgggtttatttttttttttttttattttagattattgtagatttgttgtttaatggtattgatgtgtatttttagaaggaatttgatgaggatttggaggattggttggtgaatgagaagttttgggtgagtggatttattaggatgttgtttttaggggatttttagtttttgttgaagggtgggttgggggtttggaggattttaagttatgaaattatatttttggggttagagggtattgagtttaggtgtttgtatttagtgttgttaggttgaggtttttgtttttgggggattttaggtttagggtagttttttttgggggtttaggggagggaattgtttttttgtatatgtgtaattaatattgtttgtttgttttttaggagatgattttatttgttgtggtgggtagtgattatgagtattaggttaatggtaagaggatttttgggaggaagattaagtggggtattattgaaggtatttgttgtaggtgttggggttttagatagatgggaagatagttttttttgttgatttagagtttgtgggttatgtttgagttagggatttgtggaattttatttattgttttgttttatttagagggaggggtttttttgtttttatttaatttttgggaaagtgagagggtaagtggtttgtgtagatgtttttattttagatttttttttgggtagggaaagatttagggagataggagttgggatgggggttgttaagttttggattttggtgtaggtttttttataggtatttgtgtggttttggataaattgtttaatttttttgggtttagaaaaggggtgggttgtagttttgtgagttagatggatttttggttttttattttgttgaagtttttgggatttttatattttagttttttgagtggttgttgtaattaattagtataaatgaggggatttaaaataatataaatgtatttttatagttttagaggttagaggtttgaaattaggggttgtttttttttgaggttttgaggattagttttatttatgtttttttttttttggtggtgtttggtatttttagttgtattgtaaaggtattatatgttttaatttttgttttattgttatagggtttttttttttgtgtttttgttttgttttttttttttttttttttttttttttttttttgtttgagatggagttttgttttgttatttaggttggagtgtagtgttgtaattttagtttattgtaatttttgttttttgggtttaagtaatttttttgttttagttttttgagtatttgggattatagttatgtattatttatttgatttaatttttgtatttttagtagagataggattttgttatgttggttaggttggttttaaatttttgattttaggtgatttgtttattttgtttggttttttaaagtgttgggattataggaatgagttattgagtttgtttttttttttttttgtttttggataaggatgtttgtttttggatttagggtttattttaagtggatgattttatttggagatttttaatgaatttataaagaaagatgttttttaagtaaggttataattatgggttttaaggtttggattttgattatgtttttgaatggatgggagtttttggggggttatagtttaatttatttttggtggtgatattttgggagggatgggtttgaatgttttttttttttttttttttttgtttttttattttttattagaatggaagaggggaaggtgtagagggaaatgtagtaggaaaagttattttgttttgggagagtatttggttgaaaggtttagtagagtaggaagtataagttttttaattttttagggttttagtttttattatttataaagtgggtgtagtgtgttaagattttagtgagttgagagattgttttaaagattatagagttttttgggaagttgttgttttaaaaaaatggttataatgataattattaggaggtattagatatttttgtgttattggttagatatgggttattttgttttatgtttgaagttttttgtatttattttttttgtagagttgaagaggtgttgtgagtagaaaatttgttaagggatttagaatgggaggtggttttagaatttatagttttagttttgtattagatttttttgagatgggagtttatgtttggaggagggtgtggagaggtatatgggttttttttttgtttgtattttttttttattattatttttgttgggtttattttgtgggagttgtttagttgggtgtagtttgggtgttttttagtatttgtttgtggtgttaggttggtttgtttttttttggtttttttgtttgtagtttttttttttttttttgtttaaagagtttttgttgtttaggaaattttttatgaaaggtaggtttgggagagttagggatggatgggtttgggatgggttggtggttttgttatgggtgtgtttttgttgtattttggtggttaattttgagtattgtaggtggttggtgatagaaattgttaggaaatgtataagagagaggtttttgtatttttttgatttgtgtgttgttgagtattattggttttagttgaggaagagtttggaatttgttaggatagttgtgaggtggtggggtttattttttagtagttttatatgaggattttggaaatgtgtttttagtattgttgggtttttatattaggggttttatgagtttatagttgatttgatatttggattagtaagggttgtgttttgtttttgttttttatttggtgaatagtattttgaggtattttttttatttttagaaattattttaagtattgttaatagaaatgtggggtgtaattgattatgttatgaatttatttaatttttatgtttttgagaggtgggtgatgttattatttatattttatggatgaggaaattgagggaatgagagtaatttgtttgagttagggagtggtgattatatattttaattttagtttgagagttttattttttttgttggtttttgttgtttgttagtgttagatgagagtgttgttggttagtttgtaggaggttttagtgtggatattgttttatatagggttgtggtaggagggtttaggtaaaggtaattggtatagtattgagagtatttgagggttgggtaaggtggaggttttggttttgtttgttggtttattaagtaaaaattagatatttttaatttggggaaaagttatgtggttttgtgatggggtagtttggagttaggtgtatgggttttgtattttgttttagttttatgtattgtggagttgagatagatatagtttttgtgttttttatgttttattttttttttttttttttttttttttttttttttttttttttgagatgaagttttatttttttgtttaggttggagtgttgtggtgtgattttggtttattataatttttattttttgggttttagtgatttttttgttttagttttttgagtagttgggattataggtgtttggtattaggtttggttaatttttgtatttttaatagagatgagattttattatgttggttaggttggttttgaatttttgattttgtgatttatttattttagttttttaaagtgttgggattgtagatgtgagttgtggtgtttagtgtttatgttttatttttgtaagataatggggataataaaggaattataagagatatttgtaggtgtgtgaagatgaagtttattatatgggagggtattgggtgtttttatttgttttttttgtttggttttttatttttagtgatgttgtttattgttttttttgttaaaaggttttttgttatataatagttatatatgttaggtattgtgtgtttatataggagttatgaagtatagtaataaaatgattattttgagatggttattagtttgagtttgagggtatttgtgggtgtttgtggttttttgtttagtttttttgagaagtggttattgttttgagtttgggtttgtatgtattgtgtgaagtgtatatgtttttgagtaatgtttagtattgttgatttttgagtttgtgaatggttgtttatagtatgtagtttttgtgtgtgtttttgtgtgtgtgtgttttgagtgtatataaggtggatggggttgtgggggtaatattttgtgggttataggttttttttaaaattttagttttgatttttgttttattttatttttagtagtttagttttttgtttgtttttaggtttttgttgggatgttttgttttttttggttattttagtggtgtgggggtttattgttttggtttttttattgtggtttttttttatgtttttatttggtttggttattgtgttattttttattagttaggaattttttggagagtaggagttgagttgtttaggagtaggagttggtgttggttattttagtattttttagattgagggtagtgttaggtgttttatatttagttgtagagtaggtggtttttttgtttttttgtttatggggttgtttttagattttgtttttggtattagtatttttgggtagggggagagaggtggggtttgggtagagtttttttattgggatattaaagttttttttgtttttttttttagttgaaaatattatatattgtgagtttgtttatttgtgggatttttttattaggtgagagatagggtgtttgggtggggttgatggttttatttttaagagggttttatagtgggtgggggtagtgggtgtggggttgaagttttgggtagagtgggtgttttttgttatttgtttgttttgtttttgggaagattttggaagtttattttttgaaaaagaaaatttattgggaaatgaagtaggtagtgaagattttttttaatttttgtgaagttggttggatgggaaggttgagttttgatttattgtggtttggtttgttagagttgtttggtggttattaagggtttagtgaggttttatgtgtaggttttgttggtagtgtggggtgtttttagttttgattttattggtttttgatttttattttttttatttggttgaggtttttttttgttttttttgagtttaggtaaggaggggaagttttgatggagagggtgttgggtgggtggtttttggagtgtgggttttggtttgggtaggtttttttttagtaagtagttggtatggatgatgggaatgttattaagaggaggggtttttaggttggtgggggtaggggtggggggattttgggagttgttttgttattgtggggatattgggttttttaatttttttttagattattttttttgagttgtagaggaatgaaaatttgagtttaggattttttttttttggggataagggtaatttagttttttgttttaggttatttgtttgttataggttatagttttggaggttggtggttatttattgtttttattttgttagtattttggatattggtttggagtaataatgttttagttttgtttttttgagtttatgtattgtttttgggttttggatttagggttatagggtggatttagagggagatatatgtattggaatatgtgtgttttgattgagtttgggtttattagggggattgattttttttttaaaatgtgtattagatttggtttaatatggtgggtttgggggattttatggggagttaagtagttgggatggggagtgggggtgggggtaggtgggtttgagtttgaggtaggttgagtagggtttttgttttgttgtttttattttgttgtgtttattttattgatttgtttgttttttatttttataggatgtatatgtagaatattaaggatattattagtagtatttattttgaggtgtattgtgtgaagtgttttaatgagggtagtagtgttatggttaatggtatggaggagaaggagttagaagttttggagatgtagatgttattttgtttatttttgggattttgtttttaagttatttttgtttttttttaggtttttttattattttattttattttatatgattttttttatttgttattgttttttatttttttgatatgttgttaggaaataagggaaggggtttttttttgagtgagttagtgatgaggttgtggtttttttgaggttgtggggaggttgtattggagttataggtaggggtgagagtatttattgaattgatatgattttttgtttttaggtttggttttttgagggtttagaagagtagttttggtgtgtagattatttgtttgtgtggggtttttagtgttggaggttttggggtgggggttaggttttgtatttgtagaggagtttagtgggttgtatgtttttttttatttttattggttttgttttttggagtgtgttagagtttaggggagaatgtagtttattaggagtatttggattttttgtttgttatatggtgtggttattatttagtttttatttttgttttgtttttaagggtagaaaattttagggttttttgttattgattgtttagttattttaagttttttggtagttgttttttttggagtagaaagtgtttttattttagttatttgtagattgtttggttagatgtggggataggttggaatgagggaggtgtttttatttttttgttattttttttttatgttatttttgtttttattgggttgtaggtgttgttgatgtgttgggatttgattgaggataaaaaggaaggagagatgatttttatttttttattttttagttttgaaaaggtttaagtaagtgagtttggtggaggagttgagggagggagttatggaaggtgttagaaggaaggttggtgggggtatgtgtgggttgtggtttgggttggttagagtggtgtgagttgtttggtgtttgttttgtttaagtgattagggaagtgtgtgtgtgtttatgtgtatgtgtgtttgtttgtttgtttagtgtttgggtttggtttaagattgggttgtagttatattaatgtttagttagttatttttgttatttattttttttggtttaggttttgttgattttttgagttggggaggtgggaggttaggtgagtttgattttgttgatttatttgtgtttgggtttttttttttagagtttatggtaatgaatttttagaaaggagagaatgggtgttaggggtgtatagtttatagttgaagagtaaggttttgtggtagtatggtttggttttttattttttgtttttatgaggggatttatgggggttgtttttgtagggtatagatgattaaagtttttttttgttttttgttatttgttttgtttttggggagaaagaggggtttgatgagattttatttaggtgtatatattattaggtgtatttgtaggtattgggttggttgtttgtagttaggagaaggttagtgagaaggagtgtatgagtgtgagtgtgtgtgtatggaagttggggtattgggtgtttgattttttttttatttaagagaggaaggattttttattatttttattggtgagatagtttattttgttaatttgttatgtttttgttaaaattaagattttgaaggaaatgagtggttagtgttagggtttaggttatgtggtttgtttagttttaatgttatttggtggtggggtggggtgggggtgggtagtagtattttagttttgagatgttttattttttttttttgtaattagattttgaaaaattgtttgttttattaggttttgttttttaatggttttttgttatgtgttttttgagaaatttgtttttttgtataaatgataaagtgttgaaaatgtattttttgaaataaatgttttaaatgtagaaattta

SEQ ID NO: 66 - DNA, 219909 bp, Artificial Sequence
  chemically treated genomic DNA (Homo sapiens)
tgggtttttgtatttgaaatatttattttaggaaatatatttttaatattttgttatttatataaaaagataaattttttgggaggtatgtagtaaaaggttattgaggaatagagtttgatgaaatgaataattttttaaagtttggttatagagaaggaaagtgaagtattttaaggttgggatgttgttgtttatttttattttattttgttattaagtgatattgaggttgggtaggttatatggtttgggttttggtgttggttatttattttttttaaaattttggttttggtaaaaatatggtaagttggtaaagtaaattgttttattagtgggggtggtgaggggtttttttttttttgggtggggagggagttagatgtttagtgttttaatttttatgtatatatatttatatttatatatttttttttgttgatttttttttggttgtaagtagttagtttggtgtttgtagatgtatttggtgatgtgtgtatttgagtggagttttattaggtttttttttttttttaggagtaagataggtaataggaagtaggaagggattttggttatttgtgttttgtaaagatagtttttatgggtttttttgtggggatagagggtgaggggttgggttgtgttgttatgaaattttgttttttagttgtggattgtgtatttttgatgtttgtttttttttttttaggggtttgttattatgggttttgaggggaggggtttaggtatgggtagattaatagagttaggtttgtttggttttttatttttttagtttagagagttagtaaggtttgggttaggaagggtgagtggtaggggtggttggttgggtattaatgtaattatagtttagttttgggttaaatttagatattagatagatagatggatatgtatatatatggatatatatatatttttttggttatttgggtagggtaggtgttgggtagtttatgttattttgattagtttaagttatggtttatatgtgtttttgttaattttttttttggtattttttatggtttttttttttagtttttttattagatttatttgtttagatttttttaaaattgggggatgagggggtaggggttattttttttttttttttatttttaattagattttagtgtattagtagtatttgtagtttggtgggggtgggggtggtgtgagagggggatggtagggagatgaagatgttttttttattttagtttgtttttgtatttggttaagtagtttgtggatggttgagataaaggtattttttgttttaggaggggtagttgttagggggtttggagtggttgggtagttggtggtaggggattttggagttttttatttttaggagtagggtaggggtaggggttgagtgatggttatattatgtggtgggtagggggtttaggtgtttttggtgggttgtatttttttttgggttttgatatattttaggggatagggttgatggggatggaggggagtgtgtagtttattgggtttttttgtaagtgtgaggtttggtttttattttaaggtttttggtattgagaattttatatagatggatgatttgtatattgaagttgtttttttgagtttttggggagttaggtttggggatagagggttatgttaatttagtgggtgtttttatttttgtttgtggttttagtgtagtttttttataattttggggaggttgtggttttattattgatttatttggagggaggtttttttttttgttttttggtagtatgttgaaggggtggggaatgatgataaatggagaaaattatataaaataaaatggggtggtgggagggtttggggggggatggaaatgatttgggggtaggattttgggggtgggtagggtggtgtttatatttttggggtttttggtttttttttttttatgttgttggttatggtgttgttgtttttgttgaggtgttttatatggtatgttttgaagtggatgttgttggtgatgtttttgatgttttgtatgtgtgttttgtgggggtggggggtgggtgggttagtgaggtgggtgtagtggggtgggggtagtggggtaggggttttgtttggtttgttttggatttaggtttgtttgtttttatttttattttttattttgattgtttggttttttatggggttttttaggtttattatgttggattagatttggtatatgttttgggggaagggttagtttttttggtaagtttagatttggttagaatatatatattttagtgtatgtgtttttttttgggtttattttatggttttgggtttagggtttagggatagtgtatagatttagagggatagggttggagtattgttgttttaggttggtgtttagggtgttggtagggtggaagtagtgggtgattattggtttttaggattatggtttgtggtaggtaggtggtttggggtaaagggttgggttgtttttgtttttaggaaaaaaaagttttgggtttggatttttatttttttgtagtttaggaggaataatttggagggaggttggaaagtttagtatttttataatggtagaatggtttttggaatttttttatttttgtttttgttaatttggaggtttttttttttgataatatttttattatttatgttagttgtttgttgaggaagaatttgtttaggttagggtttatattttagggattatttatttagtattttttttattagggttttttttttttgtttggatttaagggaaataaggagaagttttagttaggtgaaaggggtaggggttagaggttagtgggattggagttggagatgttttatgttgttggtagggtttgtatatgaggttttattgggtttttagtggttattgggtagttttaatgggttagattatagtggattaaagtttagtttttttatttagttaattttgtaggggttgaaaaggatttttattgtttgttttattttttagtgggtttttttttttagaagatgggtttttaagatttttttgagggtagggtaggtaggtggtagggggtatttattttgtttagggttttggttttatatttattgtttttatttgttgtagggtttttttaggggtgaagttgttagttttatttaagtattttgttttttatttgatgagaaggttttgtaggtaggtaaatttatagtgtgtggtgtttttaattaggagaggagataggaggggttttaatgttttagtggagaaattttgtttggattttatttttttttttttgtttagaaatgttggtgttaaaagtagagtttgagggtagttttatgggtaggagggtaggggaattatttgttttgtagttgagtataggatatttggtattgtttttagtttgggggatattggagtgattagtattagtttttgtttttggatagtttagtttttgttttttagaaagtttttggttaatgggagatggtatagtgattaggttaaataggagtatggaaggaagttatagtggagaagttagggtagtgggtttttgtattattggggtgattagggagagtaggatgttttagtaggggtttgaagataggtagggggttgggttgttgggaatgggatgaagtaggaattggagttgggattttaaagaaaatttgtggtttatagggtgttatttttatggttttatttattttgtgtgtgtttagagtatatatatatagggatatatataggggttatgtattgtggatgattatttataagtttaagaattagtaatgttaaatattgtttagggatatgtgtattttatataatatatataagtttaagtttgggatagtggttattttttagggagattgggtaggagattatgggtatttataagtgtttttgggtttgagttggtggttattttagagtggttattttattgttgtgttttgtaatttttatatgaatatgtggtgtttggtatgtgtaattgttatataatagaaggttttttaataaggagggtagtgaatggtattattggaggtggggagttgggtagggaaggtaaataaagatatttggtgtttttttatgtgatgaattttgtttttatatatttgtaagtgttttttgtgatttttttgttatttttattattttatgaaaatggggtgtagatgttgggtattatggtttatgtttgtaattttagtattttgggaggttgaggtgggtggattatgaggttaggagtttgagattagtttggttaatatgatgaaattttgtttttgttaaaaatataaaaattagttaggtttggtattaggtgtttgtaattttagttatttaggaggttgaggtaggagaattattggaatttaggaggtggaggttgtggtgagttaagattatgttatggtattttagtttgggtaaaagagtgaaattttgttttaaaaaaaaaaaaaaagaaaaagaaaaagaaaagaaaagaaaatgaggtatagagaatgtaagaattgtgtttgttttagttttatagtgtataaggttggagtgggatgtagaatttatatatttggttttaggttgttttattgtagagttatatggtttttttttaagttaaaaatgtttagtttttatttggtaggttagtaggtagggttggggtttttattttgtttagtttttaagtgtttttagtgttatgttggttgtttttgtttaggtttttttgttatggttttgtgtagggtggtgtttatattagaattttttgtagattgattagtagtatttttatttaatattgatgggtagtgagagttggtaggaagaatggggtttttaggttggagttggagtgtgtgattgttattttttggtttgggtaagttatttttatttttttagtttttttatttataaaatgtggataataatgttatttgttttttagggatatgaggattaaatgagtttatggtgtgattaattatattttatatttttattgataatatttggggtggtttttaaggatgggaaagatattttaagatgttgtttattaagtgggaggtaagaataaggtatagtttttattagtttgggtgttaggttagttatgaatttatggggtttttgatataaaaatttagtagtgttgaaggtatatttttagggtttttatataagattgttggaaagtgggttttattattttataattgttttgataggttttagatttttttttagttggagttagtggtgtttaataatgtataggttagagaggtgtggggattttttttttgtgtattttttgatagtttttgttattggttatttgtggtatttaaggttggttattagggtgtagtagaggtatgtttatagtaaagttgttggtttgttttaggtttatttatttttaatttttttaaatttgttttttataaaaagttttttaaatagtaagaattttttgggtagagaggaagagaggaattgtaggtagaggggttaaggggaggtaagttagtttgatattataggtggatattggaaaatatttaggttgtatttagttgggtagtttttgtagggtgggtttggtaggggtggtggtaggggaggagtgtagataggggaaaggtttgtgtgtttttttatatttttttttaggtatgaatttttattttgagggagtttggtgtagggttggagttgtagattttagagttgttttttgttttgggttttttggtaggttttttgtttatagtatttttttaattttgtaaggagggtgggtgtggggagttttggatatgaaatgagataatttatgtttagttagtggtataggagtgtttgatgttttttggtaattgttattatgattatttttttagagtaatagttttttaaaaagttttgtggtttttgggatagttttttaatttattaaaattttggtatattgtatttattttgtggatgatgaaaattgaggttttggaagattaagagatttgtgttttttgttttattgggttttttagttaagtgtttttttagaataaagtggttttttttgttgtatttttttttgtattttttttttttttattttaatgagaaatgaagggatagagagaggaaggggaaggaaatgtttgggtttattttttttggggtgttattgttaggagtgggttgaattgtggttttttaggggtttttatttatttaaagatatggttaaggtttaggttttggaatttatgattgtgattttatttggaaaatgtttttttttatagatttattaaggatttttaaatgggattatttatttagggtaggttttaagtttaaagataggtatttttgtttaaagataagaaggaaagagggtaggtttggtggtttatttttgtaattttagtattttgggaggttaagtaaggtgggtagattatttgaggttaggagtttaagattagtttggttaatatggtgaaattttgtttttattaaaaatataaaaattaagttaggtgggtggtatgtgattgtaattttagatatttgggaggttgaggtaggagaattatttgaatttaggaggtagaggttgtagtgagttgagattgtaatattgtattttagtttgggtgatagaatgagattttgttttaaataaaaaaaaaaaaaaaaaaaaaggaagaggagggatgggatagagatatagggaagaaggttttgtgataatggggtagagattagagtatgtgatgtttttataatataattaggaatgttaggtgttattagaaggaggaaggtatggatgaggttggtttttagggttttagaaggaaatagtttttgattttggatttttggtttttggaattgtgaaaatatgtttgtgttgttttaagtttttttgtttgtgttaattggttataatagttatttaagagattaaggtgtgagggttttaggaattttagtagggtaaggggttgagggtttatttggtttatagagttatagtttattttttttttaggtttagagaggttgggtgatttgtttagggttatataggtgtttatgaaagagtttgtattaggatttagaatttggtggtttttattttagtttttgtttttttgaatttttttttgtttggggggaggtttggggtggaggtatttgtataggttatttgtttttttatttttttaagggttgaatggggataaggagatttttttttttgggtggggtaaggtagtggatgaggttttatgagtttttggtttaggtgtggtttataggttttgggttagtagaagagattgtttttttatttgtttggagttttggtgtttgtggtgagtatttttgatggtattttatttggttttttttttaaggatttttttgttgttgatttggtatttgtggttattgtttattatagtaaatgggattattttttggggaatgggtagatggtattggttatatatgtgtgggaaggtaatttttttttttgggtttttgggaggagttgttttgagtttggggttttttaaaaatgagagttttagtttgatagtattgggtatagatatttgggtttagtgttttttggttttaagaatataattttatggtttaaggttttttaaatttttaatttattttttagtaggaattgggggttttttgggaataatattttagtggatttatttatttggaattttttgtttattagttggttttttgagtttttattaaattttttttgggggtatatgttgatgttgttggatagtaggtttgtggtgatttgggataaggagggagagagatgggtttatttttgtggtaagttttatttatttattggtgtttgttatatgatttttatattgtgtgttgttttaggtttgggtttaagggtaggttttggggggttgtgatattaattatttttaatttttgtgttttttggagggaagaggggtagttgtaggtgtatttgttgttttgagtgatgttgtaattttttaggggtttaaggttattgttttgagtattttttatttttttttttttgtttattatagttttaagaaagtatttagggttattgagatttttttttttgaaattttttttaaaaaatttttgttatagtttttagttttagtaggggttttgtttgtagtaattttttagttttttgttagtagtttgatatgggtatgtgtaatagaaatattttagtgagtggttgtttgtttgtttaggtatagattatagtttgtgtgtagtttttggtagatatatttattttgtgtggattgtttttttttgtatatgttgggaaggtttttgatatttggttttaggatggagtaggttataggttttatttatatttattgaggtagatgtggtgttgtagtttaggtattttggttttattttgaaaggtattttatgtggttttgatgtgttgttttgttaggaggaagagtttagggttgtttttttgtttggatgtttttttttattttatagtaggggttttagatggtggtggagaagaaggtggtagagattattttttttgaaatttttttttttttttttttttttgagatggagttttgttttgttatttaggttggagtgtagtggtttaattttggtttattgaagtttttgttttttgggtttaagagatttttttgttttagttttttaagtagttgggattataggtgtttgttattatgtttgattaatatttttgtatttttagtagagatggggttttattatgttggttttaaatttttgattttaagtgatttgtttgttttggttttttaaagtgttgggattataggtgtgagttattatatttggtttagttttttttttatttaataaaaattaggtagggtgaggtgaggtggtttatgtttgtaattttagtattttgggaggttgaggtaggaggattttttgagtttaagggttagagattagtttgggtaatatggtaaaattttgtttttattaaaaatataaaaattagttagatatggtggtgtgtgtttgtaattttagttatttggggattgagtttgggaggtggaggttgtagtgagttatgattgtgttattatattgtaattttggtaattgagttagatttttttttaaaaaaaaaaagggggggtataaaataaggtgggttatgttgtatggtttttgtttggttttattttttggaagagagatttattatttgtttggtttaggttttttttaaaattttttttagagattttgttggagaattggtatttttataaagttgtttttgagatatgggggagttggagaggttattttagggatggtttttagtagttatttgggttagggattattaggttagttatttgttggggagagtgattagtggtttggtttttttgatagtgtgatttttttagatggggtggtttttgttaggtttgtagtgtttttaggttgtatagaagggttggggtaagtagagatggaattttatttgttgtttgaagtggatttttttttttagggtgagtgtgtttgttttggtgatgatagggatgatgttgattattttgtttaggtgttttataaatttgatgtttaggggtttgaggttgaagtagagggatgtgtgtgaggtttatttgggggagtggggtagtgggggggtatttatttttaagtaggtgttgatatttttaggtgttggtttggggtttatgggggtttttgttggtaaggatagggttttgggttgagttggttatgttgtgagtgtggggtagaggaaggatatgggtgtgttttagatataggtgatattattgtataggttaggtgggttagggttagttttaagtatttttgtttatgagttttggggttttaattatatttttatatgtttatatagaagggttgttgttggtttagtagttgttttgttgtggggttttggttgggaggggagaggtaagagaaatagaagttagtattagtgtgtggtgtttttgtattaggtgggttgtttttttgtattaggtgggttgttttttttgtttgtttggttttagtgagtttggggtttgatgtggggaaagttgtgggtggtaggggttggtagggttttggaattggggtattattttttttagttttggagttgagttttttttatagtgagaataaattggttatatatatggttggggagaagtttgttttgggtagaagtttaagtagagatggttaaggtttgtttttgttttatgggattggatgttttgggtgggattaggtaatatgtttagttggagttttagttaaagggttagtgttggggagtggtagaagtgttatagattgtttgtttgtttttggtttgtttagttggtattaggagaggtttttgttttttgttattagttttagttgaggtaaagtttggagtagttggaatagttgttataggattgtaggtgagttgttttgtttgggagggtagatgtttagtttaggagaggtttatggatagtgggttggttttttgtttttgatttttgttggtttatagaggatgatgttagagggtgggtttgaaaattttggtttgggtttttttatagattttgggtgaggtttgttgtttattagttaggtttttttttgtatttggtgtttatagagtatggtttttttaaatttttgggttttttttgtttagggaagtatatttgggatagtaggtgtgaaggattttttttatttatttatgtagataagttatttatggttgtttttattagttatttttgttggtttttggtttttttttttttagttttggtttagggtgagttataggtgtttggtagggggtgtatagggagttgaggatagagggtttgtgaggttatgaagagtttatttgttagggtatatgtagttttttgtttttgttgatttttaggggtgatgttaggtgtggatagagttggtgggaggaaagggtttttattaatattaatagtagttttgtttagttttggaaggggttagtattgatttttgtgttttttgtttaagaatgtattaaattttttaaggggttttatgaggtagggtttggatgagaaggttagttattgttatgggtgtttggttgggggtttttattttatttgttagagtttggtttgagaaggtaggatatagattattaggttttagaatagtttagggtttgtttgatttttagttttttaagatgtagttgaaggatgggggttgggtaggatatttgtataggggttagtgtgaggttttggaggtgtagatatggtatatttttaattttatagttggtggttatggtttttgatttagtttttttgtatttagtagtagggtagatagtattgttttgtagttttaggggatagagggaatttagggtatttggtatgaggatgttgatattgtagggatgtatgagtggttggtggtggggatgaagtagaggtagtagtggatgtgggtgtttgggatgtgttttttgtggttgatgttgatttttttttgtaggtattttttgtattggttattgatgaattttatgatgggttgttagttgtgtgggggatggggatgagttagtaggtatatgagatgttttttttaagtaggttgtgtatttttaggatttagagtttaatattttattttttaatgaaatgtatgttttgggaggtttggtttgttgagtggagatgttatagttttatttttggttttttaaattagtttttttgggttggttttaggtgatgagttggggatagtaagattttttaggtaattttgttttggtttagaatttttaggtttttgagatgtgtggttttggtagtatgttaggttttaggaggtgggttttgtatttttgtgggttgggaaatttttagggttgattttgggtggggtttagggagttttgaagtttttgttagtgtttttttttttggaggggttttattagtttttgttgttgatgtggtttttgaattttggtgtgttaattattgttagttttatttggatgtttttttttttaatatttgtatagagttatggatgtagagttagaggggagatggaagatttttatagatattttatatttgattgattttggggtaattttaggtaggtagtgatgataattaaggagatattgggaaattaatggttttttttagttaattttggtataggttggtgatggtttttttgggagttttttgtttgttagatttttggtggaaaatttagttgtttgtggggagtttagtgtgatggggtttataggggtttgggatattgatttattatagttagagttttaatatgtttaatatgttggggatggtgggtatagtgagtttttgttttggggatttgggattgtttgatttgggtatttttatattgtattagtgttttaggaaggtatgggtattttatatttttagtttatttttagttattgattgtgtgtgatggttttgatttttaatttttgtgttttaggaaggtaggggtgttttgtatttttagtttatttttggttattgattgtgtgtgatggttttgattttttattttgtgttttaggaaggtagaggagttttgtatttttagtttgtttttggttattgattgtgtgtgatggttttgatttttaatttttgtgttttaggaaggtaggggtgttttgtatttttagtttatttttggttattgattgtgtgtgatggatttgattttgatggttttggggatgtgtttttttgaggtgggttgtattgatttttggttgattttggatttgaagagggtgttgattaaggtggatttatttaagttgttttgttttggggagaggatgggaggttggttaggggtttttttggagagattagtagggtttgtatatggggttttttttatttaggtatgaggttttttagtttgagatttagtagtgtttgggttattttttggtaatatttttgttaagtagtttttgaggattttatttttgagttgggtgtttagtgattgtgtaaatttatatagttgggttttgatgttagtataatttaggttatagtttttttttgagaggtgagttgggtttgggagagttggtattttttgtgttttttgtgttttttggataggaggttttttggtggtttagattttggataggatagaggttgggttggtggaggagtttagggttgtttagggtgtattaggtggttgggatttttgtagtttattagggtggttgtaattaaagtttaggtgtttaaattgtttttttttgattggttagggtttgggtaagttatttgattttattgtgttttagttttttgatttgtaaaatgggataaatagttttttttttgtggagttggtgtgagtattaggtaggtttatgtatgttttatggggtttgtggggttatgtgttagggggtgttggtttgtagggtggtgttatttgagggatagtgattgtgtgtgtagatagttagtttataggtgattgagataaatgaggatgaggaagtagtatttatatgtaatataatatatataatttatatatattttatatatatattttataatatatatattttatatgtataatttataatatatatataatttattttaaatatattttttatatatattttatatataatttttataatatatataaataaattatatataatatgtgtgtgtgtgtgtgtatatatatatatatatatatatatatatatatatttttttagatttggagttttattgttttattttgtatagagttgttttgggttatgttagtaatatattaaaaaaaatattttaggttaggtgtggtggtttatgtttgtagttttagtattttgggaggttgaggtaggaggattgtttgagtttaggagtttaagattagtttgggtaatatagagagattttgtttttatattaaaatgtaaatattggttaggtgtagtggtgagtatttatagttttagttatgtaggaggttgaagtaggagaattgtttaagtttaggagtgtgaggttgtagtgagttaggattattgttattttagagtgatagagattttgttttttaaaaaaataaaaattggttaggtgagatggtttatgtttgtaattttagtattttgggaggttgaggagggtggattatttgaggttaggagtttgagattagtttggttaatatggtgaaattttgtttttattaaaaaatataaaaattagttaggtatggtggtatatgtttgaggtatgagaattatttgaatttaggatgtggaggttgtagtgagttaagattatgttattgtattttagtttgggtaataatgagattttgttttaaaaaaatataatataaaaaatattttaaattatattgatgttttgattttgataatatttttttaggaaaagtgtgggtttttgggaggatagaggttggtgttgggaatttttggtttgaattgtttagtagtttaaggatggatattttttgtttatttttttttgtttattaggtttgtgttttggttaattttaggttaggagttatgttaatgttttagttatgatattttagatttaggagatgttaattgggatattgtaaggtgtatttttttattattgttatttttattattattattattattattattatttttattattattattatttttattagtattattattataatattattattgttattattattattttattatttttgttattattattatttttgttatttttattattattattattgttattataattattagtattagtattattattaattatattattattattattttattattattattattaatattattattatttttattattattattattattattaatattattatttttattaatattattattatttatattattattataattattattattataattattattattattttttttattattattataattattattattattattattattataattattattatttatattattattattatttttattataattattattattatttatattattattattatttatattattataattattattattatttttttattattattattattattattattataattattattattattttttttattattattataattattattattattttttttattattattataattattattattattttttttattattataattattagtattatttttattattattattataattattattattattattattattattattattattataattataattattataattattattatttatattattattattataattattattgttattattattataattattattattatttatattattattattataattattattattatttatattattattattataattattattattattattataattattattattatttatattattattattataattattattattatttatattattattattataattattattattatttttattataattattattattatttttattattattattattattattattataattattattattataattattattattataattattattattattattattattattattattattataattattattattattattattataattattattattattattattattattattattattataattattattattattattattattattattattatttatattattattattattttattattgttattattattattattattatttttattatttttatgattattattattattatttttattattattattattattattataattattattatttatattattattattattttattattattattattattattattattatttttattatttttattagtattattattttattattattattgttattattatttttattatttttattattataattattattattattgttgtaaatttttgaataattataatttgttggggattttgtttggggtttagtttgtttgattttattttatgggatgattttattttatggatgaggaagttaaggtttatagaggaggagtttaggggaagatatataagttttattttgttgagttaggataaagttgggattttttttggggtttgtggatttttaaataggtgtttttttattttgtttgtatttttgtaggtgggtatagttgttatgggagggaggagggaggagagtagagttgttttatgttttgttttttatttggtatttttgggagggagtgattttgtggggaattaggattattgttttttttagggttgaaagggtgaagaggtttagataggtgaagtggttttttgtgtattatttttagagggtaaggttgttatagtggtagttatggaaggtgagggttgttgggttgtttttttttttttttggggttaaagttttggaagaaggtttgtgttatggttgggatgtagaggtttttaggttttttttattttgtttttggttagggagtagggtagtttttttgtagtttatagagatgagttttagtttggttattgtttttgggttttttttttttttttttttttagttatttttttgggaggtagttttgaatttttagggtataagtatgttttttataataggtagaatagggtgggggttgtaggaggggattttatatttttgtttttttttgaagtaggttgttagtttttaggtagttgtgagtatagtagggttatgagtagttgggttttatgaggttataggaagtagagaggatattaagattttaggggagttagggtttagattagtgtagaagaggaaagaaaggtgttgggttggtaggtgtgggtttgtgtttatagagttgggtaggaaggatgtgtatggttggtaaaggttagagaaataggtttggtttgagaggtgtttagatattttgtagaaattttgtaagtttatttttgtttagggtgtgatttggtgggggtatttttttagatttttttttggattttgtggagtgggtagaatatagttttgggagttaaaatggtggttgtggttttttgttttgtgagttaaggaattttggtagttttttttgagttttgtttttgtttggaaaatgggatgttttttttatagggtttttgtgaggtttgaatgggatttggggggttttggaaataataggtggtttattgtagattttagtttggtttttttattttgtttaggttgtgttgattgatgattttttgtggtgatttttagttttttggggttattagggggtgtggaagttatgaggttttaattttagggtagagttgaagttgagttgttgggaagtttttggttggggtgtggtggggtgtggtggggagtttggagggttaggttggagtaatagtgaggggatagttgttatagaattttttgtataagttgatgttattgtttagaggtagtgattatttattaggatttgttttaggttggtttgggttttttaaagttattttaggggttttggatgtgtaggataggtttttttgaggagttgttggaggttgtgggttttttttaggtgtatgtatgtatatgtaatgttattggtaatttgtttttgaggttagggttgttgttttattttatagaagggaagattaagtttaaaggtttgtgggttgttttgggggttgaggttggtttttggtattggttgagtggtatgtaaggtgaggatttattgattattatgatgttgaatttgaagttttgttttatggttttttggtgtatttgttttaggatggagttaatttttatgtagttgaagtttattggggtttttttgttttgtgatgtaggtgtttgtttgagtttggtatttttgggggtgttggttatgttgttaatgtagttgggagttgttttagtggttggggaaggaatagtagaggagttagagtggaataggggtttatatataggtgtttgttaggtggttgttatatttatttttggatggggaaattgaggtattgaggtttagaaaggttaagtgatttgtttaggtgatttttgagaatttttttgggtggatgtttttggttgtggtgttttttaaaaagttgttattttgtagttatgttgtttttttagtaaagttttatttttagatttttaaggttaggtttttttatttttttttttaggagttgtgttaagttgggggttttttgtgttttaaggtagggttgattttgaatttttgtttttgtattttggagggttgtttagataagggtggagggtgttttttttttttggttttttatattgttttgggttatttaggtggatttggtttttttttttatttttatttagataagttgtattgtttgttgttatttaaaggttttagaagttgatttatgagttaagatataggagggatggttttgtaagaaatggggatagaattagtgtgtgtttttgttttttatatttttatggatggttttgtaagaaagggggatagaattagtgttggtttttatggagttgtgtgtttaattttatagaatgagttagtagttttgggagaaggaaaagtgttgggtgtagggtgggtgtttggatgtagagttgtttttgggtttatggaggaggggggtttttgtattatatttgtttttttttggattgatttaggtggttgttttgtgtgtttggttagtgtttatgggttgtatatttataggttaagattaagttttatttttgggtatgtggggtatgtggagttgaattttttgaaattattaaagttttttttgtttgtaggtttttttgatggttttgtttttggttgttgttaagatattatatatgggttagaggtttggggttgggggtggatgtttggaagatgtttgttgaggatttaggtgtttttatatagtggggttttaggggtatttaggatggggttggtttttattagggttggttggtatatgggttaggttttagtatattttagatttgttatatttattggtgtatgtgtatgtaggtgtagataatttgttggttatagaggtggtgtttttgttagtttttataggttggagttgtttttggtggtttttagtttttatgtaggttgggtggttgttgttttgtgtttttgtttttgtttgggtttatttaggttttgttttgtttgtggggagatttttgttttattttgttttttagggaggatttggttttaggtattttgtgttaagatagggattatatggtatgtttttaggtagggttttttttgttagttttttgggaggggagtggtttttttttgggattggtgggtatttagtaggggtagttataggggagtggagttggtgtgggagttagggttatagtatgggaggttgtagggggtttattttttgtgataggtaagtgagtagtttttttagataggaggtagtttttttggtttatgtttattttttattttgtttagaaggtgggaggtaggtttttaggttaggaggggtagtgggagattttagtttaattgtttttttatttgtggggtaagaattgaatttaggaaatgtttattgagttttttggttgtagtttgtatttttagttgatttaagttattttttttggtttattttattggagtggttagagggtgttggagggaggttttttaggtttgaggtattagaggtgagagaggaaaagattttggaagttagaaattgggggttggtttatttttataggtatttttttgtttttttagtttttatagggtataggaatttttattttatggaattgggggaataaaggaataatataattttttgttgggaaatgttaagggggggtttatatatttttattgttgagagtaatatttataggtggatttggaggttagggtttttttttttgtgtttttatgtggtttttatttaggttatgtagtttggaagtttttagggttttgtttttgtttttgttttttttttagaaatatttttttttgggtttttaggatttttaaataaataaagatatagttttgtatttggttatggattatgtggttttggggttgttttttgaagttagatatggggttttgttttgtggggtagtagtttagtttttatttatgtgattgaaaattgtttttatttgtttgtgggtttgagagttattttgtttgggattgggattagtttttatttgtttttatttttttttagtattttttaattttttttagtaggatttggggggaggtgttgttttttgaattttttttttttgtttttaatgtttttggagtttagagtgagggaggggttggtttagttgtagttgggtttttttataggtattagtatttattgtagaaatttaaattaaattaaatattttgtttattaggggttttgtttgagaaataataatataatgtagttgagttttatttttgttattgatgtagggtagtggtttgttttttgtataggtgagagttatttttgtaattttttttttgagaggtggttttgtaggttttggttggtttgtaggtaggtatgtatgtagagagtaatgtaagagtttgttttgtttttttatttggttaggtgagttttggggtttgtttttaggatttttaagtgggaaaagtagagatttttatatttagagatatttttattttggttttaggatattatggtgtttagatagttggaaataatggtaaagattatttattttattgtttgtgattatgatattgtttgaggtttgtgttgtttagtgtggtagttattggttatgtgatttttttttttaattgttataatgtttgttatggttattattttgaagtgtgtagtttagtggtgttaagtatatttgtattgttgtgtaataaatttttagaatttttttattttgtaaaataaattgtttttattaaataattttttagttttattttttaagtttttggtaatttttattttgttgtttttttgaatttgattattttatggatttggtataagtggaattttataggattgtttttttgtgattaaattattttatttagtgtaatatttgaaaggtttatttttgttgttgtaggtattttaattttttttttatggttgagttaaattttttgtatgttttattttttttttttttttttttagatagagttttgtttttgttgtttaggttggagtgtaatggtgtgattttggtttattgaaatttttgtttttttaggtttaagtaatttttttgttttagttttttaagtagttgggattataggtatttgttattatgtttggttaattttgttttagtagagatggggtttttttatgttggttaggttggttttgaatttgtgattttagatgatttatttgttttggttttttaaagtgttgagattataggtgtgagttattatgtttggtttgttttgtttttgatttttttatttatttgattgtgggtatttgggttgtttttatttgttggttattgtgaatagagttgttatgaatgtgggtgtataaatatttttagttttttaagatgttgtgtatttttttgaatttatatttagaagtggaattatgggatgttatggtggttttagtttttgttttttgaggaattgttatagtgtgtttataagtgatttttgagtatttgatattgagttagtttaattgaggaatggaatttttatttttatttaaatttaaatagttatattttataaatggtaattatattggatggtatagaattttagtttaatttattttttattaatggggaaattgaggtttatagagtgatttttttttttgaaatgttattgtaagtggttaggttagtataagatttttattgaatttggtaattttgaaattttatatttttgtttgtatgatatgtggttaatatttgtgattttttttaaagattgtgggttttagtaagatggtagttgttttgttgagatttttattgtatttttaggttttgttttgttatgaatatggttgtgtaaggatttgtttgggtttttgttttttatttttttgggtatttagattaattattagtagtatttatgttgatttttagaaaggttttgatttggatagtaattgatatgttattttatagttaaagtaaaatgtagagttttttttttggttttgtagttgggagttagaggttttaggttttggtttttggtttaaagtgattttttgtaagtttttttagtttggtaaataggttatgtattttttgattttttttttagtttttgttttgtgagtttttgggtgtttgaggttgtggtttatttagtgatatttttagtttttagtgtagtttgtgagtagtataatatatttggttttagaaataattaatatatttgttaatagatgtgtggagaaatttaatgtgttgagttaatatagtggattattttttagttataaaaaggtatgagtgtgtgttaatatagatgaattttgaaaatattttaattgtaagaaattaagtataaaaagttatattttttagggttttagttatatgtttagaataagtatatttgtagggataaagtgtagattggtgatttttaggggttgggggagggggagtgattgtgtattgaggatggtgtttttttttggggtgaggaaaatgttttggaattagaggtgatgtttatagaaggttgtgaaaaaatgttatttaattgtgttttttgaattggtggatggtgtaatatggaaattatatttttatgaggatgggagaggaagggaaagaagggaaggagggagggggaaggaaatagggaaggaaggaaaaaagggaggggaggagggagggatggaagaagggaaagaaggtagttatttttagtggagttggattgaagagtttaatgggtgtagtaaattattatggtatttgtatttttatgtaataaatttgtatgttttgtatatgtattttagaatgtaaagtaaaataaaataaagagtttagtgttttttataagtgtttaggagttagttttatagtttagaggatagttgaggtttagaggttaatatttaggtttgaggtttttaagttggtgttgttagattatgttttagataaatttttttatttttttgtagtaagggtgtttttagggtggtagttaggtggaggtgttaggtggtgggagattttgatagtttttttgtaggtttttattttgaatttaggttttatgttagggtttttttgttatttattggtgttggtggtagtaggttattggttttgtgatggggattgtttttaaatttgtttattttggggattagtttttttttttttgtaggtgtttattgggttattttttttttagagttgtaggtgggtttaaggtagggatgaaagggttgtaatttatgtagttttgagttagtattttttgggaatatttgtatttagtgataaatttttattttaattttaggatttgttgaggatgagggaattagattgttgtttgtggttgggatgggggttgtaggatatttggttgggaggtagtgtttagagaggaggtagttattggatatgatatattttaggggtatttatatttattatagttttagggttgattttggtttatttggtttggtgttgagagagggtttgatatagtaggtttgtaaagtttgatttggaaattaagatttaggggttgtttttttttgtttatttttttttgtgtgttatgttgtttggtttatgttttagaaatgtttatataagttttattagttttgttggttaaatgtagagatggtgttgttggggtaagggattttgagttattgtttaatgttatttttagttttaggggagtgatagttgggtttgtattttaggataaagtgtttagggttaagttaatgttatttttttgttttttttaaatttaatttatatttggtttttagagtatggattgaaatggttatatttttatatattttgtttgttattgttaatggtggttaagtagaatgtaaggttattttttttttgtttatggaggtttgtgaagttattgattaggttatggtaggggagttggtggtatttattatattttgttagttttttaggtttgtgtttaggagaaagttgttggtatttatagttggtgtttttgttttggtgaagatttttttgtttttatttattttggtttagtgtgggtttagtagtttttttattttgttttgtaataatgtatattggagtagtttttagttgttttttttttgtaggtttttttgaatttagattttggggttagtatttttgtggtagttttatggttatttgtaggtttttttagaaatttgagtttatgggggtattttaggttttataaattaatagatgttttttgttttttataaaggggttttttaaagttgagtgagtttttgatgtaggtaatgttaggaggatagtgtttggttagggttgtttttttttttttttttatttttttgggtgtttgtaaagttttttagatttttgttgaattttggggaagttttgttttgtaattagggtttgttttttttgtttttatatagagtttgttttttgtgtttagatagtttttttatgatggtaattgaataatgatgtgtgtggtttttttttattataatttttttatatagggtttgtgaagttagatattttatttattatgtttattttagtttggttttttttagagtagtgtagggtttatggtaagttttggtaaaaagtttggtgaatgaatgaataaatgaagaaataaagtttattatagtagttgaggtttattgggggttttttgtgttaggtgttattttaatttttttttttagagagtgggttttattaatgttggttaggttggttttaaatttttggttttaagtgatttttttattttggttttttaaagtgttgggattatagatataagttattgtattgagttttaggtgttattttaaatgttgtttaggagttattataattgatggattattatataattttataaggtagttattgttattgttttattttatagataaggaaattgagattgagagggtttttgttaattatgagggttgtaaagtgagtaagtggtagagttaggatttgaagttaggtaggtgagttttaggttgttgattttttttttaggttaggtttttgggaattatggaaaggttggagaagtatggggtttttgtagttaggatttagaaggtgtagttgtggtgtaggtagtttagtattgaggttttggtttttagttttttttttagttgtttttttttagggagttggaggtagagttttgaattgttaggagaagattttatttgttagttagggaaagttgttagggttttttttagggtttagagttattttaggtttattaaagtatattagtattttagtttttataattttttttgtaagaaagatgatggtattagttattgggttgggttgggggttttagattttaggggtttttttaggtttgtttatggtttttttaggatatagatgtttatttgagaaattttagtgtattaggggttttatagttaaaataaagaggtagagttgttttggggtttttgttaaagtttttaggtagatttatttagtagatattaaaatgtttattttttatttgaaaattttatttttaggaggttgttttaggttgggttgataaaatttatagagattttaatgatgattttttattttaggtatgagtgagtgggtggagggagaagttattgttaattattaatagtttaggaaatgtaggtaaaggaaagagaatggtaaggtgatagggttggaaattagatatatgtgtagaggtgagtagattttagagaaagaattgttttggaataagatggtaaagaaattatagataataatggtagatgatgattttggggttttagtggattaggattataatattgatttatttgataagtatttattgagtgtttattttatagtaataaaaagatgatattataggtttgagagtagttagaatgaaaatagtggtggtatatgggaatttgaagtttatttatttaaatgtttattagttgagatttttggatagatttgaagtagtttttaatatgtaaggaatttataatttgatatagtagtataggatatgtgtgtgttataaatttttggtgaaaagtaaagattttttttagaaaagtatatattgaagatagatagatagatatatatgtattttgaatggtttattaaagaatttttaggtttgtggattttagttaaaaaaataatttggtattttgggaggttgaggtgggaggattgtttgagtttaggagtttaagattagtttgggtaatgtagtgagattttatttttataaaatgaaataaaataaaatgagaattaaaaaaaataaataaatttggtgtgatgagaatttatagaatttaatagggttattttagtattatttgtagtattttttaaatttttgattatatatataaagttttgggttttatagttagagaagagggagagtaggttaaaaataattatttaaggtggaagatgagtttgagaaataaagaggtaagaggagaagattgaggttagttgttttttatttttgagttttggtaggaggaagtttttaagtgagaataagttgttgtttgtggagtggattttagagtgggtggatagagatgataaggaatgttatttttggggggttttgaaaataggatatttttttattttaattttgttttttattgtattgtgtttttattgatttatttaagttattataaatattttataaatgttattggggattttttgtttttttttaaagatggaaatattgaatataaatgattaaattgtgtaaatgtgtgtgggtgggggattaaggattgaatttttaaaatgtatatagtttatttaatttgttaattaattttaaattaaattatattttatattttgtatgggataggaagtgtttttttaaagtttggttaggatttgggatgttggaaatttgagattttgttttttttttttgagatattttgaaattttgtttagaaattgagtataatggttttggttttttagagaaagatatggatttgtaaaggtaaagagttgtatttttttttgagttggagttttttttggtttttattatggggtttaaataaaattgtagttttatagtttttttgttggtgtttttttttttttggtgattaataaggtggaagagttaataagaattttgtgtgtttttttgtaggatttggaagggataggtggtgtgagtttgtttttatttagtttttttttttatttatttaggggttgaggtgtttttgaggtagggggtgggggtttttatttttattgttggttaaggtttttttagttttttttttgttaaatttttttaagtaaattttttttttattgtggaggaaggaattttaagtagttttgtttttttgttagtatggttttaattggttttagttggtaaagttaaatttggataaggtttaagggttttttatattatttgttgttttttggaagaggtttttttttgtttttttatttgtaatttattatttttttagtttgagtttttttatttaggttttgtggtttattgagatattaattttgggttagagtaagttttgatttgtaaattattattatttattttttaaagagttatttttagaatttaggttgtagggagggtaggttaaggatgaattttttgatttttggtgtggtgtgtggtggggggggttattttatattttgttttttgttgtttttttgttttgttttaggttttgaagtggatttattgtagagggagggttagggaatggttttgatgttttttttattttaaggaattttttagtaggagtggtttttattttaaagtaattttaagatttagtttgtgttagttttttagttatgtttatagtggtttgttaattagagatttttttagtttttggtaaatttgtaaatttataaagagaaagaaaagtttttttgtgggtgggtggatattggttatttgttataggttggaatttttttttattagggatgttttttaagtaggggttggggagggtagggtttagagtttttttttttttagttttttttgttattagtagatttgttagtagatatatagtagagtttagtagtgaggtaataataggggttgtgggggttggggttttgttttttttaatttatgaaattatttgaaataataaaatttagataagggtttttggggtgtaatagggtggttttttgttaggtgttgggtagaaaaaaagtttttttttaatttttttttgttgtgtagattagtttgggttttggggatgttgtagaggttgttttatgtttaggttttttagagatagtagggggttggaggtatggtttgtttgggggtaggggataggtagggaggggtatatttttgggttatgagtaggagtttgattaaatgatttttttaggagggagaaagatattgtatataattgtttgattatagttagaggggttggaaaggtgggggaaaggggtgaaggggttaattgttttaggtgtttttaatttatgtagtatttatttggattgataagagttgagagattggaattgttttttttttttgtttttaggttttgttttaggagtttttttgtttaggagtttgggagttgaggaggtttggaagtagtgggtttatagtgttattgttttgggaatttatagtgttttggatgtggtttttttggttttagttttgtaggtagtttatttggattgtatttattttttagaagagttgtttagaattttgtatgtttgaaagaaagattaattaaagaagtgaggaagttaaagagaggtttatgaaagtttatgatgtattttttaagtgtatattttagtaattttaaatgttttttgaagtaaggatggggatggatggttggataaatggatgggtgtatgggtgtgtgaatgggtgagtgggtgggtggatggatggatagatggatgaatggatgggtaggtggatgaataggtaggtgaatggatgggttggtggatgaatgagtaaatggatgaatgattggatggatgggtggatgagtagataggtggatgagtgaattggtggatgagtggatagatggatgagtggatgagtagatgagtgaatgggtggatgagtggatgggtgggtgagtggatgagtagataagtggatgggtggatgagtggatgggtagatggatgggtgagtggatgtgtggatgagtggatggatggatgagtggatggatggataagtggatgggtagatgagtggatggatagatgagaggatgggtagatggatgggtgagtggatgggtgggtgagtagatgggtggataagtggatggatagatgagtggatgggtggatgagtggatggatatatgggtggatagatgggtgagtggatggatgatgagtggatgggtggatgagtggatggttgagtggatggataaatgggtgaatgagtggatgggtagatgagtggatggatagatgagtgaatgagtggatgggtggatgagtggatggatagatgggtgaatgagtggatgggtggatgagtgaatgagtgaatgagtggataggtggatgagtggatgggtggatgagtgtatagatagatgggtggatgggtggatgagtggatgggtgggtgagtggatgggtaggtggatgagtggatggatagatgggtaaatgagtggatgggtggatgagtgaatgattgtagataggtggatgagtggatgggtgaatgagtggatagatgggttgataggtggatgagtggatgggtggatgggtgggtgtgtggatgggtgagtgagtggatgggtgggtgggtggtaagatgggtggataggtatatggagtttatttaaggagttttagaaatatatatatatttttttattttagattttttttaggaaaaagtagtgtgtatggattgttatttggttatattttgagatagttatttttattttttttggaatattgtttggggggatgtagtatagggtatttaagtaatttttgagtttagggtagagatattaggaagtagtaggtaggttgtgattttgtaggtttgttttatggtttttgttgtttgtattatggtatgaagtttagatgtatttttggatttggggttttgattagatggagttattaattttttgaagaatgaaatatataggggttatttttgttttttagttgtagggaatgatgattatttagttttttttttttttaaattttttttaggtttttgtgtatggttttgttgattttttttttgtttttggttatttttttagtttttgttgtttttttttttgtttttatttatggagttagttttggtgttttgagagtttttttttttagttgattttatttagtttttgagtatttaatgttaataatgttattttttttgtttagatttatatttgagtgttagtttgatttatagatgtgtttttgggttttgttgtgttaggttttttgttgggttttgggtatttgtagttattgttattgttaagttttaatatttgaaggtattttgaatttaatgattgtgttttaggttgaattttggagtttttattttatttgttttttattttattttttatttaagtgaatagtttttttagttaatagttattgtagttagatttttaggggttgggtttgggttttttatttttattattttgaatttatttatttattttaaatttttattaatgttaatttaatatattttatagttattattattagttgtttttgtttgaattttttttttttaaagtattagggggtgtgtgtaaaatttattaatttgatgatttttttttatgaagttgtgattggtttttattgtatttgggatatattagatttttgtggttttagaattttgtttattattgatgtgttgtgtgattttgagtaagtaatttaattattttgtgttttaatgtttttatatgtgaaatgggataataatatttgttttataagaatgttggggattaaatgagatatttatttatgaagtatatagtgttgtgtttggttagtaaatgtttgaagtttttgttaataaaatatatgtttttaatttattttttagtttttatttatgtatagtttttttggttgttttttagtttttttaataaggttatttatagaggttttttttgttgggattattttttttttatgttgtttttagaatttttatttgtttttttgggatagtttatttatattgggttttttagtttttgttttgttttgttttgttttgttttttttgagatggagttttattttgttgtttaggttggagtgtagtggtattatttgggtttattgtaagttttgttttttgggtttatgttatttttttgttttagttttttgagtagttgggattataggtgtttgttattatgtttggttaattttttatatttttagtagaaatggggttttattgtgttagttaggatggttttgattttttgattttgtaatttgtttgtttttgttttttaaagtgttgagattataggtttgagatattatgtttagtttaggttttttagtttttatatatgtggttttttgattgttgtttggggtttgttgtatttattatttataaaattttatatgtttgaagtatttagtaagatgttgtgaatgagtgaatgaataaatgaatgaatggttagtttgttgtttttttgtttggttttttgttttttttagattagtatgggggtagttatggtttttgtttattttggtaatattgttttttttgtgttggttgtgttggttagagtttttttttatggtgtttttgtggttttggtgtgtggttgtttgtgaatgagatttatgatttttggtttttattatttttttggagttataaagtattaaggtggaaggatggatgggttttttgggatagttggggtgggaggttggtttaggaaattttttttaggaaatggttagtgtgggatgaggtgtttggtgggaggggagtggagtggggatttggggtttggttgttttgtagttagggattttaatttttatttttttttttgtttattttttaattttagtgttgggtttagggtttttggggttttttttaggaatatagaagatatagtaaggattagggatataggataggtagagtttatgggtaggaggtttttagttagtatatttgagtttatgtttggttttaattagatattgagattttggttaggttattttttatgttgaggtaggggggttttttagaggttattggtttttaagtattgtgtggaagatatgttatggagagttagtattttttgagatattagtagaaggttagatgttttgtggtttaaggatgatttggttttagtgtttatttatttgttgttttgtatgaaaagtttgatgtgatatggttggttttagtggaagagtgatttgggaattggtagagtggatttagtaattggtaaattggatttagtaattgagatattgttaggggtttggtagaagttttttaatgtattagatttagttttgatttttatagagtttagttgagtattaaaaggtgtagaggttgagttgagtattaggggaatattgattttagggttgattggtgttgtgtgtgtattttatagtttatagatggtttatatttatttgattgtatttgatttttttttgtgaggttttttttagattttttgttttttaaagttattagttgtgttttttgaaattagagtaaagtaataaaattgtagtaatagtgtgtttttatgaatgttgtgatgttagttggttaaatgagggagtttttagggttttttatattgttttgattttgtgtgttttttggttttggtttattttttatattttttgtttttttttttttttttttttttgaggatttagggtttggggttgatttattgtgggattttaatggtgattttttggaagaaatgtttgttttttttttttatttagtagtgatttttggtttgtttatgtttatgtagttaatataggtagtagttggaatttggaagtttttggggtgggagtttgtttttttttaggtttttttagtttgaattttgggaaggagttatatttatatggtaattttttttaaggttgggagggggaaggggtttggtttgggtttgattatttttttgaggttgtgtttattgggttttttaagttagttgggttttttggttgtatttttgagggatggtaatagattatagtgtaaattgtttattggttggttgggtagtgggtgtttagatgtgggttagggtttttgttttataggttgtgtggtggtttaaagtgggtatttttatgggtatatatttgtgttatagtttatttgtgtgtgtgtgtgtgtgtgtgtgtgtgtgtgtgtgtgtgtgtgtgtgtgtgtgatagtttagaaatatggtaatttatagtttttttaagatgttggttttgggagatttgtttatttgggggttttagtatttttagttttttttaggaaggttttgttttttttggtttgaagttggttttagggaagaatttttttagaaaaataaaagttattttttttagttttagtttagtttttttttaggggtgagttatattaaatttattttttttttttttttttatttttttttttatgttgtaattagttgtaagtggtttatttatttaggtttgttagtttattatagaaaagatatttgaattttgtattttttttttttgatttgttttgggttttaataggtaaaggaaattggaagttagtagttaggatttagttgtaggtttttggggttattttgtgtttttattttagttttatttatttttgtgttgatttaatgtttatttattttagtttatggagtgaggtttggatttaagataaaataaagggggttttggttttttggggtttatagtgtttggtgttggtgagataattttagagtatagtatagagaaatggttgtgatatggatttgtagtatttggttggttaagtatagtaatgtatttttattaggtttgggttttttagtagatatatggtttaaaggttggttggttaaattatatgattttgtaattatttaagagaaatgaaaatatgtttatataaaaatttgtagattagtatttattgtagaattttttataatagaattatgttaaaaagtagaaataatttaaatgtttattagtagatgaagagatatatagtgtggtttatttatgatggaatattatttggttatgaaaaagaatgaagtattagtatttgttataatgtggatgagttttgaaaatattttattaagtgaaaggagttagatattaaggttatatattgtatgattttatttatataaattatttagaataggtgaatttatagagatgaaggtagatgagtggtggttaggggttgagagtttggagttgggaatggggattggttaatgggggtagggttttttttggggatgatgaaatgtgttgggattaatggtgatggttgtgtaattgtgatggttaattttttgtgttagttgggtgtagtggtttatgtttgtaattttagtattttgggaggttgaggtgggtggattatgaggttaggagattgagattatggtgaaattttatttttattaaaaatataaaaaaaaaaattagttgggtgtggtggtgggtatttgtagttttagttatttgggaggttgaggtaggagaatggtgtgaatttgggaggtgaagtttgtagtgagttaagattgtgttattgtattttagtttgggtgatagagtgagattttgttttaaaaaaaaaaaaaaaaatttttgtgttaattggattgggttatggggtatttaggtaattggttaaatattattttgagtgtgtttgtgaaggtgtttttggatgagtttaatatttaatttttttattttttagaaagtttagtttattgttagtatttatttaattttatataaatatgttttttgaggttgaagtaaatttgattggatgttttgtgtgaaaattaaatataaaaattggttaggtgtggtggtttatgtttgtaattttagtgttttgggaagttgatatgggttaattatttgaggttaggggtttgagattagtttggttaatttggtgaaatattgtttttattaaaaatataaaaaattagttatgtgtggtggtaggtattttgtaattttagttaaatttaggaggttaagattggagaattatttgaatttaggaggtagaggttgtagtaagttgagattgtgttattgtattttagtttgggtaatagagagagtttgttttaaaaaataaaaaaattaaaaagaaaaaaaattttttaaattgtttttgtagttatttttaagtaaaataatagagttatttgagttgtttattttggaaaaattagatttattaaatgaatttttagttaataattgattaagaataatgttaatattatttgtaggaatgttgtgttttttaggatttgatatttttagtgattgagaattattatttttttttaaattttatttatttatttattttttgagatggaattttgttttgttgtttaggttggaatgtaatggtgtgattttggtttattgtaatttttgttttttgggtttaagtaattttttggttttggttttttaagtagttgggattataggtgtttattattatgtttggttaatttttgtatttttagtagagatgggattttattatgttggttaggttggtttttaatttttggttttaggtgattagtttgttttagtttttttaagtgttaggattataggtatgagttattatatttagttgagaattattatttttttttaaaggaaatattattattaaaaatggaatgttataaatagaatgatgttttttgtttttaaagttgatatattagagtgatgtgaaaataataataaaagtaagatattttttggtaaatttattttggggtgaatgttgtagttataagtattgttggtgagtatttttggggtaaataggaaaagggtgtaattaggagtttgggtaaagtagattgtgtgttttgatgggggtgggttttatttgattagttgaaggtaatagggtttggaatgtatattttaagatatagtgttttggtatagtaaatatttttagttgaaggaatttaagaaatggtaggtttaagaagaatttattgatttgttttttttttgaagtagattataagttttttatgtaagaggtgttttttttatatttagtggaaaggaatagttttatttttagagatagaggatttgagaggggttttagtatataggttttgttgagatttttatgggtttattgtttagtttattttttgttgttttgttatagttttttatgattttttattttttattaaatttagtataaaaatgtttaggtttaggttaggtatagtagtttatatttataattttagtattttggaaggttaaggtggttagattatttgaggttaggagttgaagaatagtttggttaatatggtaaaattttatttttattaaaaatataaaaattagttgggtgtggtggtatatgtttgtagttgtagttatttgggaggttgaggtatgagaatggtttgaatttaggagatagaggttgtagtgagtagagattatgttattgtattttagtttgggtaaaagataagtaaaagaaataaataaaaaaattgtttaaaataagtaataaataaatttaaaaaataagtaaaataaataaaaattgtttaggtttaggttgggtatagtggtttatatttgtaattttagtattttgggaggttaaggtaggaggattgtttgagtttaggagtttgagattagtttgggtaatatagtgggattttgtttttataaaaaataaaaaattagttaggtggggtggtatatgtttgtagttttagttatttgggagtttgagttgggatttaagagtgggtttagagtagtttttggggttggtagttgggttttagtttgagtttaggaagttaaggttgtagtgagttgtgattgggttattgttttttagtttggatgtgtgatagagtgagattttgttttaaaataaaataaaaattgtttaggttaatggtttttttgggtttttatttttttatgaaggtttggtgttaagtaaaatttatttgaattgttatgtttgttttttgttaatttttgttagtttaatttttagggttttagttaatgaatttaaaattgatagaaggaaagggtttttttttagattttgttttgattaggtttttgtaattttgtgataaaggtttgaaggtttgaataggaggatataaggtttgagtgagagagaattttttttgtttaattgtttttaatttggaatattagattttttttgttttagatttaaattgatatatgtgttttttttgggttttgggattggaatgatgttattggtttttttgggttttgggtttttaggtggatattagagttgtaatatgggtttttttgtgtttttagtttgttgatttattttgttaattttggtatttgttaatttttgtaatgaggtgagttaattttttataataataaatttttttatttaaatatatgtatatattttttattggttttgtttttttggatgattttaatataattattttgtgaatatagtaaaattattgaattgtagattttaaaaaggttaatgttatagtatgtgaattttatttttataaagttattatttaaatagtaataagaagttggtgagttttgtgtatttttttgtaaataagagtagggatagtgttgtttttgtttttggatgtttttagtttttagtttgagtttaggaatattttttatgtgtttttttttttaattttgtagtttaagggtgggggtggtttttagtttggtattttttttgtagttttttattttttttttatattagttaatggatatagaggtttttttatggatttttatttttatttatttatttttatttttttgagatagagttttattttgttgtttaggttggagtgtagtggtgtgattttggtttattgtaatttttgttttttggatttgagtgatttttttgttttagttttttgagtaattgggattataggtatgtgttattatatttagttaattttttgtatttttattagaggtagggtttttttatgttggttaggttggttttgaatttttgattttaggtgatttatttgttttagttttttaaagtgttgggattagaggtgtgagttattaagtttagtttttttatagatttttaaaagggttttgggtaatatagattgggatttgttaagttattaaatgatttttttaaataaagaaggaagttataaatttttatttaaaaggagtgggggatggtaatagaaatatagttagttagaagttggaagggttttatttaatttatttttaaggtttttgggtagaagggataagggaaaatttgttttttaaatattttatttggtattttattttttggatgtaagatgtagttgtgtatagtggtagtagtgaggattttggtttggtaggtttttatattttttgttgagggttttaggggttagggttgtttaataggattaagaggaaatgattataggagtttttagttgttgggggtggtttttgtggttttttgggttatttttggtgaatttattttaaatttggaagaggtttaagtttttttgttttttgtattttaaattttagttatgttagttaggagttttgggggatgagaaaaaatttaattaagttttattgtgttgggtgatataggatttagaaggagaggggtttttggattgtttaagtttaatgataattttagtagttgggtttttaagttaattagtttttttttttttagtagtttttggggagtattatggtgagttgtgaggagttagtttagtatggtatatataatgtaggggtttttttgtatttttattttataaatattagggttttttgggggattagttttttatttttgagttattttttttttattgtttttttaataaggaatagagaaggagtttttattgtttaattagatgtagaaattgatgtatgtatagagaggttatgtgtgatatggtttggatgttgttttttttaaattttatgttgaaatgtgatttttgatgttggaggtaaggtttggggggggtggggtttgggttatgggggtggattttttatggatggtttggtgttttttttatggttataaagtttgggagatttgattgttatagagtttgggagggttgggtgaggtggtttatatttgtaattttagtattttgggaggttaaggtgggtggattataaggttaggagtttgggattagtttgattaatatggtgaaattttatttttagtaaaaatataaaaaaattagttgggtgtggtggtatgtgtttgtaattttagttatttaggaggttgaggttgtagtgagttgaggattgtgttattgtattttagtttggttgatatagtgagattttattttaaaaaaaaaaagagtttgggagtttttttttttgttatgtgatgtgttagttttttttttattttttattatgaggaaaagttttttggggtttttttagaagttaagtagatgttggtattatttgtatagtttgtagaattgtgagttaaataattttttagttttggttattttttatagtaatttaaaatggatgaatataatgtattagtttttttttttggattttatagtgtgtttggttggggttgtgttttggggaaatggtaattgtgaggtttttatagattgggtttgggttttaattatagttgtattttagtgttttgatattgttgagtggatgtttaaaaagtattgttgggtgaatgtgtgagtgaatgatgaagatggaggtggttgttggtgttagggtaaggttttaggagtttggggaggtggtattaggtagtttaggttaatggttaattttggatagggttaggaggtagttagaatggttaaggatagttaagggattttaggtaagtggttttattttttttaggtgggtaggaagtaggaattagattaaggggtgttaggtggtagtggtatttagggggtttgaggagtaggtgtaggtttagtagggttggtggtgttatgtgtggggttgattgtggttttgtttattgtttttattttttggatgtatgggtttatggtttttaaggtttttttttgtttttatgtttatttttttaggttttatttttagatgttaagttatttttttatttttattttttttgttgtttttatatttgagttgattttttttttgagttttggtgaaattttagagagtttagaggtgtagtttatatttttgtgttataaggtttttgtagtttttatttttttgggatattttattttagagttgggtgtgtatttattttattggattagaaattttaggaatgtttattttgtatgtttttgttttttattttttgtttgttatttagtttgtggttgttatgtggttgggttttggtagttattgtagttggtaatatataattagtatttttgtgtttaggttttgtgttgagtttttttagttttatttttgtttgtttttaaaatggtttttgatatggtaattattattatttattttttagataaaagattatagttttaggagaggaggaatggtaggtttgaggttatgtggtttgtaataggtaaatggatttggtagttattttatttttgagtggggtttttttttgtttgtagattttgttgaggttttagagtttggagttagtgagtttttattgagtataaggatagtggtggtgttggggttggaataaggtagggaggggttttttaaattatagttttggttgtggatttattttgggattttgttttggttgggaattttgttttagtttatttgggatatttttttattttgagttttgtattgggttgtgtatggggtttgttgaatgagtgagggtaggagggatggtgagtagggtggaaagtgattatggtgggtaggtttttgttggaagtttgaaatatttttggtgagtaggaaaatattaggggaagaggttatagtttttagaagggtttgttggggattgttttgtagtttttttattgggataggtagaaaatttagtttttttttagggtgagtttaggaagtttgtgggggtataggttttagttagggtggtgtgtgggtttatttaggggatgttgttgtggtttagagttaggttaaattttatgtattttgtaaataattatttataataaataaggtttatttattttttaagaagagtaaaatattataggaggtatttttttattaattaaatatgttatagtgattttattgtgttattgagggagggtattagggtgtttggtttagagtaaattgtggttagggggatgggtatattgttaaattggttagatttttatttttgaaaatgtgggttaaattttttttaataagttataaggaaatttagtgtgaattttatgtttttattattattggttgttttggaagattgggaggaggggttttgttttttttttatttttggttatagggtttgaggttataatttggattgggattttaattttttttttggggaagaggtttatttagggtgtttgttaaggtttagtgtataaatatggaatttgtttaatgtttgttttggtatttttgggttttttatattgggtttttttatttgattttttaagtagtgagagtgatgggatatggggtgtttttaggggagatttggggagatggagtaagttttttagtttaaggtgaggttttgaggtatggtttatgtagtgatgttttttatgggaggtttgaggtatgattaggagtttggagatttagtagaggtttgggtatgggatttttggtatgtagttagagtgagggttgaggttgtatggatgtaagtaggtgattttgtgttattgggtgttatttgtgttgggttttgtgtagttgtttttattttattgagttttagggaggtgaggtaattattttaggtatatagttttgggggtaaaggttggatttaggtgtgtttgattttagaatttaagaagataagtagaggagtttgagttttttgagattgtagtgatggtttagtgttttaggatggttaggttggtttttgtagttttagttaattgtgtttttttttagttatttagggttttagtgttggtttttgagatttggtattggttataggggtttatttttggttgtggatatttagtgttggttattgggatttggtattggttgtggggatttgtttttggttgtggggatttagtgttggtttttgagatttggtattggttatggggatttgtttttggttgtgggtatttggtgttggtttttgagatttggtattggttatgggggtttgtttttggttgtgggtatttggtgttggtttttgagatttggtattggttatggaggtttgtttttggttgtgggtatttggtgttggtttttgagatttggtattggttgtgggggtttatttttggttgtagggatttagtattgtttatggggtttgtttttggttttggggagttagtagtgtttgtggggtttatatttggtggtggggatttggtgttggaggattttgatagtaaaattatagaggtgataggtaatagtaatttattagtatagtgtgtggtttgttttagttatggtatttttttttattttgtgtttttttattataaagtttagtgtaggtaatgaagttaagaggtggagaatttgtaggaggatgtatattatatttgttttttgtgtggtgtttttgtattttgggtggttgagattttttgttttttttttaggtttttttgtgttaggtttgtgttgttttttttggttttggtttttatttatttggttttttagttatagatagtagtgatttttttttttatttaatggggttattgtttagtttattattagtttttagggttggtagatgatattggttatgggtagtgttttttttggttttagtatataaggtataaaagatattattttgttttaagatttttttagttatgtggtgtatgggaagtggtgttgggaattttttagggtagttttttgttttgggggagattgtgtttaaatttttgaggaaatgttgttttttggttttttttttgaaaaattttttaaggagattttgtgtggagtgtgtagggagaatggagatttttgtgagattgttttgggatagttttatagaaattataaattatttggataaaagttgaaaatttgtggttatataatgttgattatttatttaaatatttgttgagtaagtatttatgatgtttgggaatttaggatgtggattgataagatataatttttatgtttgttttagtgatagagagagagatggtattattaattttgtttgttgggggtttttttggagggggtgtgtaggtttagggttgaatttgtttagtggatgtgttatttatgtttgtgtattttttggttttgtggtggtttttggaataaaggttgagagataaaagataaggatttgggggagggaggatgtttatgtatattttattggggatattagtaaggatgattgtttagtgattatttagtgattgagttatttggtgtttggagtttggtatttatagagtagggtgggggtagtaggttttgttgggggtataggtttgagaagggagtgttgttagttaggtttgatgggatagagagtgaagggttttttttttgaaggttatgtagaggttggaggttaatgttagtaattttattaatgttagttttttgagattgatttagagttggggttttaagagtagttttgggtgtttaggagttaagattttatagagggtgttttttatttttagtttagggaaagtgataaatttggagtgtttttgtttatggtttaattattgaatttaaatgaatgtattgataaattgtatttagtgttatttatagggaaaagggagggaaaaaaaaaaaagaaagagagttaattgtgtttaggttggttggttagggggaggatagatgggttattatttttgttattttttaggttttttgtattgattttttatttttagtaaaattaaggtttagtttttttttgtagttttggagttggttgggatgaagtaatttttgtaggtagattattaggtttattgtgatggttttagtagggaatttagtttaggttatagtagtttaggtgtttgtagaaggtttagatttttgggtgttaagttttttttttttgtatttgttttggggtttggtggggtgggtagtgtgtgatttttagggttgatgaaagagaggaggaagaggttgagtggtggtgagtttgaatagttaattttgggaggggttgaggtggggaaggtttttattgttgttttataggttttggagtaaggtttttatgattttattagtagttgggtaggtataggtttaggtgttgagtgtgttaggatttttgttgttttttgggtgggggtgagagggatttttatgggtttgtaattagatttgtgtttttttagttaattttttattaaataaatttatatgtatagtggattgggtatggttgttatttttgggagtttttttgggaaagttttttaaggttttgttgagttttgggaataggtttttatttgtttgggaattgggttggtatttaataaataaattaaagtttggtgttggaaggtagaattttgggattagagttttagttaagggttataagttttttaggaagttttttttttaaagagtggttgtgggatgttgggagtttttagggtggttagtttttaggtttttttaaagtttaggtggtattgatgttttgtgttaaggtgagggttgtagagaggggttggtggggaggagtttttatagtttattttggttattgattttatttttaagtattgaaataaagttttttttttatatttttggttagggagagagggtggaagttttaaatatttggggtgtatgggaaaggtttatatgtatagaagaattagataatggaagttgttggtggtggtgataggttttttaaaggggttttgagatttttgatattggtagggaagttatatattgtattaggtttgggggtagggagaaggggtttttaaggatggggttgtttttttttgtggaagtgttttgtattgtttgataagagtagtttggattagttgtggtataataggaagttgggagaatatggtggtttaggaggttggttagggttggggagtggttaatttagagattttggttgtttaagtgggtttagggtttttggggtgaaagtttttgtggagtatagtggatttagtgtttggaggatagattttaggtttagataaggttttttttttttttttttgagatagagttttatttttgttgtttagattggagtgtagtagtataattttagtttattgtaatttttattttttaggtttaagtgatttttttgttttagttttttgagtagttgttattataggtatgtgttattatgtttggattagttagtatttttagtagagatagggttttattatgttggttaggttggttttgaatttttgattttaggtgatttgtttgttttggttttttgaagtgttgggattataggtatgagttattgtgtttggttaataaggttatttttgatatggaatgttggtttgattatagtgtttgatggtttttgtttgtaattatgtttttgttttttattaaagtagggtttttagggtagaagttgtatttttttattttagagtgttttatgttattttttaggtgtatatagtgggttttttttattgtagttgaattggttttattattattataatgatagtttataggggtgggggttagtgggaatataaagtggttaatgtaatagtgttttagttattttgatatagaaatggttaggggatagaaggggtaagttgggagttagtagtaatttaggtttttagagatgagtattaaaaaaggtgagttatattataggttttttttgattatattttagtttaaaagagatttaaggagaaataagaattttatttttttaataaggatttgtatattagatgttaagtaaatattttttttttttttttgaaaaggagtttttggggttgttgggggagttggttaaagagaatgatatttatggaaatatatgtggttttattaagttttaaggtaaggtggtaatgaatggaggaggaaaatttatagtattattagggaatggggtttttttttgttttttttttttttaatgggtttttttatgtgggatttaaattaaattttaattttattttgatttagtaggtgttgtttttatagttttgaatagatttgttagaaaattattgtttaatttgtttttgggtggtatatttttttttaggaaaggaattataaatttattttagatgagtagagagttgttttttaaatttttgattaaaatatagtagattttatatgaaaaagtaaagagagaggggttagggatgaagtgtagtaggttggaggttgagttagtttttagagttattgggatggtgttttaggagtagatggtattgtttataaagttttttgtttttttttgttttgaggttggggattattttgttggttgtatgatttagtttttggggtttttttagtatgaaaagattttttgaaagtaggtttgttagggagattttttagtttttgtttattgatatgtttttgtatggttgatatgtagtatgttattgtagagaagtaaagtatatgtagattagttttgttagtagtattttttttttttgttttttttaggaatgttttgtatatatttaatatatttaggaatttagagttgtgttgtagtagtagttttttggattttagtgttggtgttgtggggagttttggttatggtattttgagtattgagattatttttagtttttagttagttggtttttgggagtttagaggggtgataatttgagtggagtgattttagagaaagtggtggttaatttgaatttttttttggtttttttggaagttagggaaattttttgtgaaaaggaaatatgttttaagaagttttgggtagtaggagaatttagttatttagtttagttggttaaatatttataaagagatagttgtgattatataaagttttatttttttattttgaggttgaaaatttggtttttgtgtggagattgagttttttgttattttttttttggggattttgtttggttttgttggttttgggttggggtttagggatagtgtggtttttggtattgttattatggttattagggtttgttttgtggttgtgttatttgagagtttttgagttagtggtgtaaggttgggaagaataaaggagtaggatttattttagtagtggaatgttgggttgtgttggatgtgttgagagttgtggtttgtttattgggttatatggtttagagttgagtagaggattaaaggggttttgtggttgtggaataaggagttttttagagtgtggggtagaggtagggagggattttgattgtttgggaagggaggtttggtggggaattgttttaagggggtagggtgaggggagtaggaggagggggtaggtagagataggggtgtttagtggtaggtttggtgtagaagtaatttgaaggtatgggagggatgttaaggagttgttatatgttaaaggaaagtgatagggtttttgggaagagtgagggggagttgttaggaagaagagaggggaagaggtttttagggatttttggttatgttgtttttgtttttgtttttgtgtttgttagaggtggtgtttgtgaggagttttttttttttagttaggttttgaaattgatttggatattttttttttttgtgttttgtttgatatttttgttttttaggtgtttttttatttatttgtttagatattgttatagttgggtttttagggagtatggttagttattttagaaagttatttagatttgtagttagggttggaatatagttatttgggtttgttttttttattttaggtgtttgttggttgggattatggaagggagaaggagtaggagaggaggggtaggggatgggggtgtagtttattttgagttttttttttgagagtttttggatttagatttgatttagtttttgtttttttagtttttttagtttttgggggatttggttagtgagttagtttttttttttttttttttttgtaggtttgggatgtgttgggatttagaggggtataagtaagggggtttttagaggagggagttgatattataggggttgggtttggatgttgggatttgttagatttattttagtgttatgatttttgaatttaagtgagttatttttagtaggggtgtggttatttttatattaggagagagtgtttgggagtgggtttgttttgagggtttgttgggggttgggagggatttatttaaatggaaagaagtttttggtgatattttttgagggttaggggttgaattttggaagttatgtttttaggtagtttttatgggattttatgttgagtgttgattgggttttatatatttttattttttttattttgtatttttatatgtggttgggggtgattgaagttttggggtatttgttatattggttaaataggttagttatgtttagtggttttttagttagtagttattggtatttgatttgttgttttttattttttatggttaattttttttttaaggttttttggttttatggttttttttatttttatagtgaatggttgtggggagttgttgttattggtttttgggtgttaggttagagttgggggagtgtttgggagaagattgtatgtttggagtttttgtttttatttgaatgggagggaggttggtggtagattagagatttgggttttgagttaaatattgaaatttaaggttttgggtttgttatttaatatttgtggaatttgattttttttatttataaaatgggtattattaatattagttgttaaaattatagtaagatatatatgtttaggttaggaagtgtggttatttagaaaatatagttttttttttttttaagaagttaatttttttagtattgggagtgagaagagtttgttttttttattgtttgtagtttagtttagggtatttttattattggtttttaaagggtagttttagaaattgttgataaaggatgttagaaggaatttttttttggttaggtgttagggttaatagaaagttttgaggatgtagtttttattatgtttttgttttgtgggtttttttttttttgtgggtagaattttttttttttggtttttttttttgaatttttttttttttgtttttggttttaatttgttttttagttttttggttttttaggttttttttagggtttaagattttgtttttttttaagtttagttttttttttttttttgtttttggatttttgagttgggaggttagtattttgggtgttttgttgaggtggttgttttttttgtagtggttttttttgttgttattaaatgagggtttttagagtatagagaaggtatttttggtttggggttgtattttttatataaagtttttgttttttagtattttttaaagttttttattgtttagtatatatttagtatttaggtagagtagttttagagtttttttggttggtttttggtttaattttttagtagaaatggtatatgggttatagatgtaattttatattttttagtatttataataaaaaatgtaagaataagttaggtatagtggtttatgtttgttatattagtattttgggaggttgaggtgggtagattatttgaggttaggagtttaaaattagtttggttaatatggtaaaattttgtttttattaaaaatataaaaattagttaggtatggtagtagttatttgtaattttagttatttgggaggttgaggtaggagaattgtttaaatttgggaggtaaaggttgtagtgagttgagattgtgttattgtattttagtttgggtaatagtgtgagattttatatttaaaaaaaaaaagaaaagaaaagaaaaaggaaattattaaaaaatgtaagaataggtgatattaattttaatattatttatttaatagagtttaaaatattattaatttaatatgtaattaatgtaaaaatgatagatatttgatattttttttttttttttttgttaggattttgaaatttagagtgtattttatatatatggtatttttttatttggaattattatattttaggtgtttaaatggttttgtgtagttagtggttattatgttggatagtgtagtttggagagttttaatttttttttttttttttggttgttggggaatagagttttgttttgttatttaggttggagtgtaatggtgtgattttggtttattgtaatttttgttttttgagtttaagtaatttttttgttttagttttttaagtagttgggattataggtgtatattattatgtttggtggttattttttgtatttttagtagagatggggttttattatgttggttaggttggttttaaattatagattttaattgatttgtttgttttagttttttgaagtgttgagattatatgtgtgagttattatgtttatttttggatagttttaatttgattttaggataatattaggttattagagagttgttgatttggattatattatgatttgaattttttagattatttttggtattatgtttataagttatatttagaggataataggatatagtttggtgaaatatatagtggtattttttataagatattggtgaggttatagattttattattagtgttatttgtttggggatattttatttttagaaaatgtagagttttttttaagaaatgaatgtggttaggtgtgttggtttatatttgttattttagtattttgggaggttaaggtgagtatattgtttgaggttaggagtttaagattagtttgattaatatggtgaaatttagttattattaaaaatataaaaatttgttaggtgtggtagtgtgtgtttgtagttttagttatttaggaggttgaggtaggagaattgtttgaatttgggaggaggaggttgtggtgagttgagattatgttattgtattttagtttgggtgatagagtgagattttgttttaaaaaataaataaaaaaagaaatgaatgttttaggtatatgttaagtattttttagatgattttaaagatattaattattgtgattgatgatgatttttttttttttttgggtgtgtttgttttgtttttttagtttataggtgtttaggatttaaaggtagtttgttataggttatgggatttggttggtttaaaagggagagtgaggttattggaatttttttaggagtgagtttgaagtttggaatgttttttggtggagggttttgaagttaggaggtgatgtagatgtgggggttgagatattatttggggttatttgtaaagagggatatttaggtagtgattttaaggaaagagtaaggggaggagagggtggtatatttatgtttttttaatttttgtttgtttggaggtttatgtattttatatgttggtttttttgtatggatatttttttaataagtaatttattgtgtttatgtttatttattttaaagttatatagaattgtatttattaaaaatgaatttatggagatagaaagtattttggtggttgttaagggttggagagggtgaatggggagtgagttttttatggatatggggtttttttttggggtgatgaaaaagttttggtgttagatagtgttgatggttgtatgatattgtgaatgtatttagtgttattaatggtaaattttatgttttgtgtattttagtataataaaaaaatatatatttaaagtaatagaatttaatgtgtttttttttttttttgagttagtttgtttttttgttttatattttaaaattagaagggttttgagatatattataggtttttagggtaggttgaataattttttttttttaaattgtgttattttatgtggtaatagggattttgtagatgtaattgaagatgttgagatgaagagattatttaggtgggttttaaattataagtgttttttaagagggaggtaggttaggtgtgatggtttatggttgtaattttagtattttgggaggttgaggtaggtagattatttgaggttaggagtttaagattagtttggttaatatggtaaaattttgtttttattaaaaatataaaaattagttaggtgtagtagtatatgtttgtaattttagttatttgggaagttgaggtaggagaattgtttgaatttaggaggtggaggttgtagtgagttaagattgtgttattgtattttagtttgggtgattttgttttaaaaaaaaaaaagaggaaggtagagggagatttgattgtagagaaggaggaggttgtaggaggatggaggtagaggttggagggatgtagttgtaagttaaggaattttagtagagttttttatttaaagttggaagaggtaggaatggattttgttaatattttgattttagtttggtgagattgattggtttttgatttttagtattgtaaaggaaggagtttttgttgttttaagttattgagtttgtgataagtagttatagtggtaataggaagtgaatgtagtttttagtttatttttttgtttatagtaatataggtgtttttttgtgtagaattttgttaggtagttagtgagtgggataggatttttttttgtttttatttggggttttgtgttggattttttaaggttgttgtttttgagatagtgaattttttatatttatagagatttattttaaagttgagaaagtgttttttttaaggggtgttagaaagaaggttttaaggtgtttttgttatatgtttatttgtttgtgggtaatatttatagtttttttttgtgatttatttaatagaagggttataggggagggagtattattggttagtttattttatagtaaggttttattttggaagttataggggatagttgggatttttatttttaatttagttaattgggagaagagtttagaatagttttggaggttgatatttgttaggaagtgtggtgatatttatgtgttgttgaaatatatagtaatatagtagtagagaggaggggatgtggttttatagttttttttttatttatttagtatgtatgtatatatatatatatgtgtgtgtatatatgtattaatttttagtttttaggttttgtattttgtttttgttaagttttttggttattattaagttaggttgtgagtatagagtttagtttttttgttaatttttttttaatttattttgggtaatattttaatgggatgtagtagatgttttttattaaatgttaagagtaatatttttttttattttttgtgagttggtggttgtgtttttgtatgggggtgtggaggaaagggttggggagtaggaatgtggttttgagggttggtatgtatttgtagttgtgatgttttgaggtagtttatatttttatttatagattaattttgagaaggggttgggagtatttatagtttttgttatttttgggttggtaggttggggaaattttgagtagtttgagtgaaggttgtttttaggtaggtatggtgggatagaggggtttttgtatattttttgtgaggtagtgtagttgttgggttgttttagtatatttgggtgatatgttttttttttggtttttttttatttggtttgggagaatgtttaggatgttttaattttaaaaataagtaaattttttttttttgatttatttatttttttaaattgtgaattttttttttgtttgaatagtttaattttttaaagtaggtttatattatggtttttagttttttattgtttatttattttttagtttgagttatttggtgtttgtttgttttattattaatttagtttttgaaaaaatttttatggttagtatttagttttattttatttgattttgagggtagtgtttgatatgtattagttggtttttttttttttttttttttttttgtattttttagtgttggggtttagatagtttttaagggtttttttgttttttgatttagttttttggagtgattatatttttgttttagttttttagtttagttgtttttttatattttgttttaggttttttttttggaatattgtttgtttttagagatttaagtttttattttttatatttttttttttgatttttagtttttttattaaagttttattggttgtttttttttggtgttttaaattagtttttttttgtttagattttataaggttagtttttattttatgattgtttttttggattattgggattattttttattaatatttattttttattttgtttttttttgtttatgtagggttttgttggaggattttttttgttttattatttttttttttaaatagttttttaggtttttttgttaaagttgaaattttttttttgtatttgaggatttttgtaatttggttaatttatttttaagtttgaatttttatttttgtttaaggagtttatgttttttagttaggttttattgttttgtaaattttatttaaaattttttttggtaaatgttattatttttaggaagtttttttgatattttttattatatgtgatttttatttttagagttagattttgatttggagattttgatttttatttatttttgttttttttgagttttttaggttgtaggttttagtttatgtttgtgggtttttgtagtaggagggtttatttttatttttttaagaagtgtttgttttattttttgttaagttgtaattttttataagtaggtatttttaatatgtttttttatttttttttttttttttttttttttttgagatggagtttggttttgttgtttaggttggagtgtagtggtgtgattttagtttattgtaatttttattttttaggttttaagtgatttttttgttatagttttttttgtagttgggattataagtatgtgttgttatgttaagttaatttttttttgtatttttagtagagatagggttttattatgttggttaggttggttttaaatttttggtttgaagtgatttgttgattttagttttttaaagtgttgggattataggtgtgagttattgtatttagtttaatatgtttttttatattttttttgaaaagttattattatattaatagtgtgttttataaattgataataatttaaaatgtgatttattattaaaagtgtgattttatttttaaataatattgttggttgtggtttgtagttagttttattatttttgtgtgatgattattttgtagattagtaatggttttaggtttatatttaatttaattattttgtttttttaattttatttttttttgagttaatattaagtgtgttttagagttgtaaatttatggttgatataaaattaggatttttaatatttaatataaagtaattgggttttgtattggttttaatagtaattataaattatgtttgttttttgtattgggtatattgtatttagtttataatatgtgtttttgttttttttattttttttattaagatggtatataggtttaaatttgttttttgggagtaattgatttttttttggaagatgtgagtagtttttatattatatttaagaagatattgttataagattttatattttttattttagtttttaagggtttatttatttttttaaaaatttatttgttttgttataatatgtgtttttttttttttatttgtttttttaagatatagttttattttgttgtttagattggaatgtaatggtatgattttagtttattgtaatttttgttttgtgggtttaagtaatttttttgttttagttttttaagtagttgggattataggtgtgtattattatatttggttaatttttgtatttttagtagagatggggttttattatgttggttaggttggttttgaatttttgattttaggtgatttatttgttttggttttttgaagtgttgggattataggtgtgagttattgtatttggtttataatatgtgtttttatttttttttttttttttattaagatagtatatgggttttaagtttttttttttttttttttttttttaagattagttggttgggtgtagtggtttatgtttgtaattttattattttgggaggttgaggtaggtagattatgaggttaggagtttgagattagtttggttaatatagtgaaattttgtttttattaaaaatataaaaaattagttaggtgtggtggtgggtgtttgtaattttagttatttgggaggttgaggtaggggaattgtttgaatttgggaggtggaggttagagtgagttgagattgtgttattgtattttagtttaggtaatagtgtaagattttgatttaaaaaaaataaaataagtgggaagaggggagatagtggaataaggagtttaatttgtaattgattgtgaataattaattgagataatttattatttttggattagttatgggttttattttttatttgtttttttgagttatgttttttagtgaaattttatatgtatgtgattaaatttgtttttttttttattaatttattttgagtgagtttaatttatagatttttaaatattgaatttaagagggtagaggaaatgtattttttttttgttataaaaatattttatttttttattgtagtgttgtttgttttatttatagttggtaatttggattttgttttttaaagtttatgaaagtaggatagattgtttgtaggatgtttttgttataaaaggagggttaggtttggtaggaggaaagaaatggaagtggtaaatgtttattttttgtgttagatagaggtattaggtgtttattgttttggggagtaaatatttttaaaaatggaaagaaaaatttttagttttattggggtgtaaaaagttatgattttttttgtggttaaatggttgggtggtttgggagataagtggtagttattttgaagtttagtttatttgtttgtaaatggagggtaatgaaattatttgttgtatgggtgtttgataggttgttgtttaaattttttgtttttttttatggggttttggggaagattatatgagttagtaatataaaagtattttgaaaattatatgaagtgtttaagtatgggggtgttggttgattttaggtttgtttttataagttggtagaaaattttttagagagggttttgtttttttttttggggtaggggttgtagtgttagatttgatggtattggtggttgtttaggttatttggtatgagattgttgttagttttagatttattttaagtttgggagggaagtaggttggggtgggggttttgaaattttttatatttttggtagagatattagggtaggtaaaagtgttatttatggtaaattaagaagtttgtttgaattgggtttaaattagtttagtttagaatggaggttagttttattttttttttttagaattaggagtttagtatattagaggttgagaaaatgttggaatagtttttttatttgtttgtttagagatagggattttaagttatttttttttttagtttattttataaattttttgtgttagattttttttgtttaggagttataggttttatttgggagttatttagggttttaaggtttttattatttagttgtttattttattaggttaggtttgtaggtatggagattagtaggatgtggtttaaatttggttgtatgttgattagttgagtgattttgggtttattttttaatttttgggaggtaatgtttttttatttgtaaaaaggggaaagggtttagtgaggagagtgataagtaaaggagatggtatttgtgtagatggtattgtgtgggtgtttagtggatgattatgtgttatttttttgttttttttttttgtttttgtgggagtgtgggtagtagggagttaagaggaagggagtagttgtttgtttgggatgtaggttgttttgaattggaagagaaaaaggaataagtagtagttgtttattgataagttttatgtatttgtgttttaaaattttaaaggtgtatttgaaagattttttgggtaaatttttttttatagatatatgaaagttaggtgtagtggtttatgtttgtaattttaatattttgggaggtgaaggtaggtggattatttgaagttgggagtttgagattagtttggttaatttggtgaaattttatttttattaaaaatataaaaatttgttgggtgtggtggtgggtgtttataattttagttatttaggaggttgaggtaggagatttgtttgaatttgagaggtggaggttgtagtgagttaagattgtgttattgtattttagtttaggtgatggagtgagattttattttaaataaaaataaatttaaaaaaaaggtatatgaaaaaggtaaaatgttatgagtgttttgttgtaatgtgttagttataaatgggaattggaggattttttaagttatttttttttttattttttttttttttgtatatgtattaatagttttttgggtgttggtagtattaggggatttggggtgttttataggttttgtttgtttagattttagagttaaggaggagatataaaagttaaaatagggtggtaagtggaataaatggggattagatggggtaatttggtagtatttggtaaggttttttttaatgagtttttaaagaggtttagtttttaggggaaggaggtgttttaggtagtgggggtttgtagaggtgaaggtttagggtggggtttttagggaagttgtttaggatgtttgaaaggaggggagtaatttatgagtttggtgatagggttggttataaagtgttatgaagtattaattaggttgtttattagtttttaggatagaaagattatagtagttaaggtgtggggatttgtttatttgatttttatttagtttagaaaatgattgttttagggttataggtaatagtttaagttttgtaagttgttggttatagggtgtagttgtggtaaggtggggatgtttattagttaagttttttaggatttttgggttgttggatatgtttgtaggatgttatgggggtaggttagattaggggtatttttatttttttttttaggttttagtttttaggttagagtgttttttggtttttggggtttttagggttgtagatagatagggagaggtttgtgttatggtgggttatttggtttttgtaggaagtggttagaggttttagtatttggatatagtagttatttttttaatttttgttaatgttgttgttgtttggggtttattttttttaatttttttttttaattagggaggaaagtattttggagtaggaattgggttatttagtttgatattttagtatgattttgtatgattttgggttagttatttaatttttttgggtttttatttttttatttgtaaattaggtagataattttttaaagttttttttagttatagaattttaagtgttaaaataaaaaaaatttataaaaaggaaatatgtgtttagtttatatttttgtttttatttgttaaaaggggaaatggatttgttatggggttttttttttttaaatagatatgggagattttttttatgattgtagaattggagtagtttagaggagtttagaattttttagagtttgagatttataggggaatttattttaatttttttgggatagaagtattgttgtttaatggtatttaatttttattattgttgtagtaaatgattatatatttgtgatgttaaataatatagattagttttatattttattttattaggttatagggaaggtgtttatagggttgtgtatttttttgaggttgtaggggagattgtgtttttttgtattttttgtttatttgtattttttggtttgtggttttttttttttttttaagttttttttattgtattttttagatggtttattgtgtttttaaaaatttttgtgatgatagtgggtttgtgtggattatttaggattatttttttattttaagattagttgattagtgattttagttggttttgttatgttatttaatgtagttttaggtgttggggattaggatgtgtttaattttgggagttattattttgttaattttaagatataggttttggagggagatgaagggtaggattataggtttaggaggttgtttgtgtgggtttgaattttggttttattattaaggaattgggggagtatattatttgtaaaatgggggttggtggggaattagttttttggttgttagtgtagagtgaggtagtgtgtgtagtgtttggagtagttttgtgagtatttgttttttttttgttaaatttataagaattgattttggtttaatggtttttttaaatttttagttttttttggttataaggttaggagtatttttttgtagggttatttaagtttttagtttttttgaaagttttggtttatatgatgttggaagtagatgtgttgtgggttgtttatttatgtatggttattggagaggtttggatgatgttgtttttaatgggtgtatagtgtagggtagggttaggtattaataattagttatagttattagtgtaagtaaggggtttttattgttatttttggtttggggttagggagaagttttgggaggtatttgatttttttatagggagtggggttataggagaatgtatttgaaaggggttggggggtagtagaaagttttttttagaaattttatttttggtttgtgatagatgatttttttaggttattattggggtttatttgggtttttgtagtatggagtttggttattttagaaggatgattgggtaggttagggttattggtgatggtgatggtaggtttttttgaggtttttttattagaagtattaggaggttagagtagttgataagtttttatttggtttttgaggggtagaaggttttgagtagttttttgattttttgaggtttttttattttattgagagatttttgagagtattgagagttattttttggtttttttgtgagagagttggttatataaaggtagttatatatttagtaagatgaatttataatttttgagtttaggtttattttggtttttttatagggagtttttgggggtgtggggtgggggtgtagaagggaggggttggtgttttatttttgggaattaggttatgagttttggatttaggttaaattatagaggttttatttttttttaggttttttgttttttaattatttttgtatagggtattttttttttttttgtagggttttattggggtggggtgaggaggagttatagaattatagtagttgttatatgggggtgttaaggtagggatgttgatgttaattgaatgggtatgggaaggtagagtaggaggttggtgttttgggtttggttaggttgtgtgattttagggaatttattttattttttttggtttttagttttttttattgtaaattgagggagtgaggttaggtgatttgtataattgtgtgaatttgtgttttgtattttttatttattattttaaataatgtttttaaattttagttttttaatgttttggtatttttttgtttgagaaatatttatggttgttttttatgttgtgttttaaatataggtattttggtttttttttgggtgtttttattagggttagaatgggtagtttattttgtaggaatttttaaggatttttagttatttttaggatgggggttggttgtttggaagtggtttttgtttatttttgttgtagtttttattatgaggttagtgtagtaaaataggaggtgtaggtggttggggttaggggttaggttattttttttagtggggtaggagaggggtgagaaaagttggatattgattattttaggttgagggtttgtgtggaggagggggtttatggtaaaggaagtgggaggatgggaaggagtttttgttggatatttttattttgttggttttagttttgtttttgttttatttgtggggagaaagtgaggttttttgttttgttaaattttagtaatgaattttatatttattttattttttgtttattggaaattttttttttattttttggatttgttttgaatagttgggttgtagaagttggtggaatgaaatatgtagggtggtttagaggggattgtgttgaatagtgttgtgtttttgtttatttttttttttgaagataaggtttttttgtttttgttttttttttgggaaagttggagagggggttgaggaaatgggatttattattaatttttttgtgtatgttggtttttagtaggtatttttatattttttaattaggtttgtagggtggaaaggtagttgttgagtttaatttaatttttatttagttgtggaagttagtgtggatggtaaagtatttatgtataaatatatatatgaggttgaggttaagagaatatgtgtttagtttttttttggttttttagtaatgtttttatgttttagttttgttttaagttttaaatggtgtaaggtttttttaggtggaggaatggaagtttttaagaagtttgtgttttagggattatatagaggtagggtttaggagtaaaggtttttagattttgtagtgtggtgttggtaagtttgtgttgttgtatttatattgttttgggatgaaggtgatatgttgattttttttaggtggttgtaggatagttaggaggaggtgagatgttagttaaaggtagttatagataatagtattatggattattagaaatgttatttttgtgttaaagtgtttgttttttttagttgttttattttgtgttaatattttttgggagtgatatgtgtgagattgggttgtgttgatgagtgattattggtatttttagattatattaaggaggggttattttgttgttaattaggtgtagggtaggtggtattggggtatgatgatttgtttggtatggttgttttatttttttttttgtttgagtataggttggtaggtttagaggagaggaggaaatagagttattatggggggtgtgtttaggggtgagttattttaagaagttatagaattagggtatgggagatattgtttagttttgttattaatttgttgtgtgaagttggttaagttattgtatttttttgggttttaggttttgtaattagagggttggttgaagaggtaaatgatagtggttagggatgggggtattgaagttagattttttgtatttggattttttttttgttatgtttagagggaggtttgggtaggttatttaatatttttgggttgtgggttttttattggtgaaatgggaataataatagaattaattttatagtgttgttgggaggattaaaggggatatttattttaggtaaagagtttttaagatagtttggggtttttaggaagtttttgttattattattggatattattatttttgttatggttgttagggttttgtttagtattggtagtttgatgttggtagaggaagggtgaggtttttgtttttttgtagtgttttttttttttttttttttttagttatggtaataatagttgaagtttatttttagttttagtgattggttatttttttgaattaaggattgaaggttttaggtttgttatttaaggtttaggtgtaagaggggtgagttattggtttttgtttttattatatttaggtttttatatgtttttttaaataggtttttgttttatgtgtaagagaagatgttaatttttatgtttggggtgggggtgtttataaatgttttggatgtgagttttgatgggggttatggtgtaggttttgttagggtatttttaattataggggattatttgtagtttatagagggttttttgtaggttaatgggattttgttattttggttgttattttgtttagttatttggtaaggaaaataggttgtagatttagaggtagtatgggtttatatgttagtgagataatataataagggaaggatgtgtaggatgagggagttatggagattttattgtagttttagttatttattagtagattttgtgtggatgttgggtaggttattttattaatttttaggatgtttttgtaggttttgtgggtggatagggtgaatggaggtataaggagggtaagtttgataggggttggggttgggtttggagttagaattttagttagttttgttattgtattttagggtattttttgtagatagtaggttaaagtaaggttgtttagattaaaggggaaggggttttgttttttttattaagggttttttggagattttaatatagatttttagtttatagatattaaatttagggtttttgagaagtgagaaatgtgaaaaatgtatagaatagttgtagtttagtgtttttaatatgttagatttatataggtatatatagtgtttttgtagaggttagaaagttttgtgttgggaagttttttgattgggggaggttttatagtaagtttttttttttgtttatttattaatgggtggaaggttttaattaggattatatgggaagggttagtgggaggggtagagagggaaaatgaataggtaatattaagtgtttggggtggggggtgtaggggatatttaggaggggagggtaggggtgtattttttatttaatttatagggaatgggggtttgggaggtgtaggagaaggttttggtatttttatttttttttttttgtagatttatttatagtttgtttatgggtagttagatttagttataggttagatgtttgttttagttttatttttttggtttattgaaagtaagttaggatagtgagggggatgatgttgttatttttggtatggttatgttgggttttggggtgggtgggaatgtggttggggtgttattttttttggttgttataggtataaaagtttttttgtgttttagtgttatatgtgggttttttttttgttgttttaataggatggatatttaagtagattttgttggttggggggggtttttgtatttagttttattttgatttagtgaattttttttttgttttttggggtaggagttattaggttgggttttaggtaatggttagtgaaggggttgtatggaggggttttttaggtttataggaagggaggttttttttttttgtaatgtggttgtagtattttgtgattgagagggatattatggttggagatggtgggatggaggattttttatagtatttttgatgtttagaatattttattttgtataaaaaagttttaaatttttttgagggttgaagttatttagagttggggtttttgttttttaggttaaaagtattttgttggagtagttgagagtatagtgggaggggaggggtaggagggaatagttttgttatggtgataggggattttttgattttaagagggtttgtagatattattatttatttttagttttgaattgttttttgttaaggggttagaaatttttgggagggggattatagggggttttgtttatgagaatagtgattgtggttaggttatagtttataagttagtaattttgtttagttgttgtggtggtttttttttgatggtttttagaaaaagtgttttattttttgttattagtgttttgaaatttaagaatattttttaaatagtaattgtagtaaaagttaatgttgtgtgagtgttgtaggtattatttttagggttttatatattttttgtttagtttttataaaaattttattttatttttttttttgttttttttttttaatagtttagaaaatgagtatggaagggttaagttggtttgaggaggggttggtggaatagtttgagggtttagtttttaagaattttatattgtaaagggaatttttgggttagggagtagggtatagtttttatttttttatttttgtttttagtattaggtttgatatagatggggttttggttatgaataaatgaataagtgaatgagagtttgttgagggaagaaggtgatagggataagggagaaataaagtagttaatgttgttgtgatgatgatgatgttaatggtagtattgatatgtgggtttttgttatgttaggattgttttaagtattttgttttatgaatatttttgttttttattatgttttgagtggatatttttattagtttattttatagaggggaatatagttgagtgtattggttaaggttatgttgttaggaaaggttagagtttaggtagtatgtggttttttagttgggttttggtttatatggttttataggtagttttatgaaatatgtagagagagtatgtgaggggtttttttgttgttttttatttttagttggggtttattttttgttgaaatttttttaatttgtttttaagttttgttagttatgaaatatttttttgaatatttagtattatttttttatggttatttggttttatttttttatagggtaagttttgggtgaaaagtagaaaggatgaaaatttttgagagaggtgataatgtggtaatttttttttttttttttttttttttgagatagtattttatttttgttgtttaggttggaatgtagtggtatgattttggtttattgtaatttttattttttgggtttaagttatttttttgttttagttttttgaggagttgggagtataggtatgtgttattatattaggttaatttttgtgtttttttgtagagatggagttttgttatgttgtttaggttggttttaaatttgtgggtttaagtaatttgtttgttttagttttttgggattatagatgtgaattattgtgtttggttgaggtggtttttatataaagtagagaaaattatttttagtttaaaataaattaataagtattgagtgtttatgtagaaaaagattagaaggaaatgtgaatatgttaatagtgtttgtttggaggatgtaattattattgattattttttttatattttttaatttaattattttgttataagtaggtgtgatttttaaaattataaaagataaatgttggttttttgtttgtgttttgttttttgagatagggttttattttgttatttaggagttggagtatagtggtgtggttatagtttattgtagttttaaatttttaatttaagtaatttttttatttgagttttttgaggagttgggattataggtaagtgttattatttttagtatttttgttgtttagattggttttgaatgtttggttttaagtgatttttttattgtagttttttaaagttgggattataggtgtgagttattatgtttagtaaagattgttttttaattaggaagatagatgttttttagtattttttgtttttttttttttttttttttttgatatggagtattgttttgttgtttaggttggagtgtagtagtatagttttggtttattgtaatttttgttttttgggtttaagagatttttttgttttagtttttagagtagttgggattataagtgtgtattattatatttggttaatttttgtatttttagtagagatggggttttgttatgttgattagtttggttttgaatttttgattttaagggatttatttgttttggttttttaaagtgttgggattatatgtgtgagttattatttttggtttgttttttagtatttttaatttttgttttttggtattatttggttaagtagatgaaaagttttagtgagttgttagttggtattaggttggggttttttttaggtagttttaagtggttaggatttggttttttttttagagttgggtttagaaattaagattgggaatgtgtgatggttgttttgtgggtttttgttatgaggttatttttttggttttagtgattggttgttggttgtagggagtatgtgggtttagttagggtttgtgttaatatggttttgttttatttatggtttagtgggtttttttattttttgttgtatgataattttaggaaaaatgttaggagggagggagttgttgggggtgtgataggagagattttttagggatagatttgtaaaaattgttttaaagttttttttaaggatttttaaggtttttattgttttttattgataggttatggtttgggtagagaaagttggggatggagttggtggggggagggtggttagtatttgtaaggtaaggagatgagttgggagaataggggttgggagggtagttttaggttagtttttgtttttagaattattgttttttttttttggttataaagtgaggttggttagatataggtttattttataggttgggaggttgggtgtgaaagtattgtgtttgtatggggtattttatggtgaatattattagagttaatttttagggtttgttgttttatagggaagttagtgtaaggtgtttatggaatttagaagtatttaaaggatttgatagttatgagttgggaggatttagttttgtagtaggagaaagagaggtagagagataggttttgtaatatttgttttatttgttgtgttgttttgagtatagtttatttttttgtggttttgagttttagttttgaggtttttaagattttttgggtttttgtagtttaggatgtttatttgaaaattaggtttagttagtagggttttttttgttagtttattattggttagtttttgtttagtattttttagtttattatttttatttgtgtaaattttatattagtattttaagtttttttttttttaggaaggagattgtttttagatgtgttttttgtttttttttgattaaagtttagaaaataggaattagttttgtgttttttttttttattgaattgttggtttttttggatgttttttttgattttttgttaatatttttataatataattagtttttagtttttttttaaatgtaattggtgagtatgttgtagtttaggtggatggtgatgtttttattttgtaatttgtgagagttagtatattttttagttaggtgggttgtaggagttagttgtggtgagggtaggaggtttgtgtgttgatggtattggtattattaaaattatggttagattaaggttatggttaatgagtttttttatttgtaattttttttttattaaggtggttttagttttagttttggttttagttttggttttggttttaggagttgtagatatatttttaagtttttattttaggagtttggttttatatatattggaggatatggagttggggtataaatagttaagaataggtatatttgtaattaggagtagggggtggagggttgttgagatgtttttatttttattggttgttttttttgatggtttattatttattatatattgattgtataattagggttgtgatatgtttgttttttatattatattattaaatttttaaatttgtttttaatttatatatgatgaggtaaatttagagttaataatttgtttattagtttttgaatttatgggtggttttaatttttttttttttagtttttttgggtttatatgagtattgaggtataagggaattttattagttgggaagtgtgttttttttttgttgattttatagtttttttagtttgtgtttgaagttgttaatatttttttatttagtattgttttttgtagtttgagttgttgttgtgtgatttagggttagtgttttaatttttttggattatatttgtaagatgaggatgttgttgtatagtttattttaaatggttattaagttgtttgtatagttaatatttgttgagtttgtgatatgattagttttgttttaattttgaatgtggtatttttatttagtttgggggtggaattgttagtttttttttttttggataaggaagttgaaaggttttagaaggtattaaggttagttgatttgttagtaggtatagtgtttatttgttatttatagtttttttttgattgttttgtttgtttttttagttgagattttgtgtgtatttgaatattttgttaatggttgaatttgtattagggttattgtgttagttgggtttgttaggttattgtttttgagttttgtttaaggtagggttagtgtttatattttgtttttttgttagtgttttatttaaggttttggaaaggttttggagttagagatttggttaaattttggtaatgttttatatttgttgtgtgattatgggttagtgatttagtttttttgtgttttttgggttgttgtgagggttataggagatgtatagagggttttgagtttggtggttggtatgttgtaaaggttagttatgtggtgtaaggatggtattgatgataataaatgaattgaatgaaaattaggttaattgggtttggggaggggtgttggttaaatagatttgagtggattaggattttgtatatgatgagtaagtgggaatagttttaaatagtaagttgggtaggtttaggatgatttagttttgggtgttgtttagggtttttttttggtttttttgttggtttggtttttttttgttttagtttgattgtttttatgggttttaataagtttttgattaggattgaggtagaatagatagggtttaagattttgtaggtaggtatagagtgtggatggtaaaaggagatgttttaggttttttgttgtttttttttttttgaaggttgataatgttaatttatagaagaagttgttttttttggttttggattttattttaatatagtgtatgaggtagttgtgtttaaggggtgtgattatttttgtagatggaatttatttattgtgtttagtttattgttagagtttggaggatgggggaagtgaggtggggtattttttatagtgaagggaaaatttagtttagttatttttttttgtgttgtttttggaatttattttgttatggttttattttaatttagttttttaaagttttagagagttttgtttttttttttgtattttattttgtttatttgtgttgggttagttttttagaagttttgttttttgttatttttagggtattaaggttggttggtgggtttagggatttttattttttgatttagttttagtggtttattttatatttattggtatttataggtgtgttttttatttttggtttttgtataggtggttttatattttgggagtttagttttttttaaggatttatgttagagtatagggatttttgtttttgatttttttttagttttaattatgagtagtttatgttatagtaattttttagttgtttgtagttgtttgttaagttatgataatggtttttgttttttaatttaatgtttgtatatagataaattgttatattttaagtagattagatattattttttttaggaagttttttttgattgttttagttggatagaggttttttttttttgtgtttttttaatgtttaataggtatttattgagtatttgtgatatgtaaggtatttataatataagttagtgttttttgtttttttagagggtatatgaataaataaatggtaagattttttaatatttatttatgttttatagaaagttatttataggtatgggagggttgttttaattgtgggtgatagggaggtttttttaagatggtagtgttttagtaagatttgaatgaggtggttaggaggtttagggagggattttttaggagggaataagtgaatatttttttgtgaggatgagtttttatgttttaggagtagttaggttaggggattggtgtagtgaataggggttgaggggagtggttaggtgatgtagggttttataggttgttttatgatgagttagtgttttaagtatagtagatatttagggaaggtttaggttggggagtgatttgaatagattttttatttaggagtttattggggtttttgggtttatgttgttgtgttattgtatgtttttgggggtttgggggggtattttttatattattattataggtagtatttttgggggaggtgtgttgtgtaggggatttgttggttattttgttgggtaaattataggggattgtgtaggataggtggttagtttaggagggataattatttaagtaggggttagagggtatttggatttgggaggagtgtttaattttttaggtttaggtaattagaggtggggggtggggtgttgttttttgatatgggaggtttgggggtttggttgtattttttggtgtggaggtgttgggaggtgtggaggtttttttttgaggttgggattttttggttattttgatttattgttttgattttattttttagtttgagggtatggtttgaatttatagttgtatatatttttttttgtatagggttttgtggggttggtatagtagttttttttttatagattaggatgtttagttttaggagggttgggattgtttaagattgtataattagggttagatatagttgggttaattttgtgatttttggttttatgtatagattttaagtatataggtaaaattttgttggttgggagggttggggggtagatgagtggggggtagtttttttttagttttttaatatgttaggtttttgggtgggagggggtataaagattttattttttttaagagatagagaaagaggtagtggagggtttttttttggttgaggttttaggttttgagtggtgaatgtaattttatttggaggttggaagttaggtggttttgggggtgtgtgaggtttgttagtttagttgtagttttttttatgtaagggaattttttttaggtagtgtttttatgattagagagggggttaggaagaggtgagggttgtatttagagtgatatttgggtgggttttattttggggatatggttatattttttttttggatttttgaagtttttaggtgtgggttaagggtttttagttgtaggtaggagagggttttatagttatagatttggggagtttagtttgtaaagtttagaggtttttggaggttgttggtttggttttttgtgtagttgggtttttttgggaggtttttttttggtatttttagtttttagtttgtatgattttttatagttgggtttatttttttaggtttgggttatatggtgtaggttagtggggttttgggggagggtagggtgttaggaatagttttgggggtggggggattggagtagagtttattttggttgtttgtttattttgtatgaaggatgttagatttttatatgtggttatttgattttgtttaattatgtgtaagttttggttatttttattttattgatgggaattaaattggttaaggagaagtttagaatttgagtagagtaggggtttaagttttttaggagttttaggtattttttagtttttttttttgagtattgagtttatatatttagtgtttggatgtttatttatttgggggtttggtgattgttagttagtatggtttataaagggtttttgtgtaataggttttatttgatttttttaaaaattttttgaggtaggataatgttatttaatttattttatagataaagtaattgagttataaaatggtttgttaaaagatatagaggtagaaagattaatagtaaagagtttttttgtgattttgattagtaaggtttttagaaaaaagtaagggattttgaggtttttataggaatagagttttggaggagaataagagtttagttttatgttatttttaaggggtattttgaaggttaaggtattgggtttaagtaggttggattgtgttttttgtattttttttattttttgaagtttttttttttttatttaggtgggttgtggaggtgtttataatatataatggaatagttggtaggttattgggttttttattgagttaaggggtttgattagaggtttaaatagtggtatagaaattatgagttttgttgtaaattagtttaggttttggagttaagtagttttgtgtttatagttagggttagttgtttttagttgtgtggtttgaggttagttttttaatttttttgtgttttggtgttttttttgtagtagtaataggaattgttttttatggtgatagtgtagatatattttatgaagtgtataaagttttgagtttagtgtttggagtatgttaggatgtagtaagtggttatttatgatttatgaaatattaataaggtgaggggtggaatgatagtttttttgtgttgtttttaaaatggaaataaatttgtttagtgtttaaagtagtagaaagtgagttaaggataggtttttagtgatatgttttggtagagtgttttttgttggttttaggtagggtttagggtgggtggttattttttagatgagtttattgttggtatttgtttttagagtatatgtttggattttttagatttttttttttttttttttgatttttttttattttgtaatttttattttttgttatttttttatttattttttttttttatttttgtttaaaaataaataatggaggttaaatgtgttagttggttttttggaaaggtttttttgtagtaggaatgtgatgggggtagtggaggattgtttagtgtaagttatgtgatttttgtgtggagttggggaaggggaggtgttgagattgagggtgttaggattgaggtattgagatggggttattggataatggttagggttagtttttgtttttattttaataggggtttttatatttaggggttatatttttaaagttttttggataagagagataaattttattatagggttagaaatgttgtttttaggttgttatttgggtgggggtgagagatgttttgttggtttttaaatatttattttgtggataaaattattaaggggaatttaatgtttttatagtagtttggttaagatataggtattaggttgggtgtagtggtttatgtttgtagttttagtattttgggaggttgaggtgggtggattgtttgaggttaggagtttgagattagtttggttaatatggtgaaattttatttttattaaaaatataaaaattagttaggtgtggtggtgtgagtttgtagttttagttatttaggaggttgagataggagaattgtttgaattttggaggtggaggttgttatgagtggatattatattattgtattttagtttggatgatagagtgagtaagatagttttaagaaaaaaaaagatgtaggtattgttttagggtttataagtataatttgatttttgatgttggtatttaattttgatgtagattttagtaggaaaagggagatgaattagaaggttgtggggatgaggggtttatagtagtgtttattagatttgttttggtaggtataagtgttttttggaggttgttagataagtagagggtttattttagagattttggttttggagggttgggttagggtttaggaagttgtattttggtagggaatttagagttattttgagttttattttggaagtaagagttagggggtagaatagaattggaattaaaagtttttgtgggtttagttttatggggatgggtttggttttatggggatggatttttgtattatttgaggtgattattagtttggttttttgggattagttttgagtgttttttggggaaagtgggatttgtagaggatggttttttaggatttgtttgattatttatttttagtttgtttttattttagtttttttgatttttattttttatttagaattttggagatttggttttggaggtttagagattagaaatgaggggagataaggggagaagtttttttttttatttgttggttatgttaatgggttgattttttaggaagttatattagttattgttattgttttggttgttttgtttggttttgaggttgggtgagtaagtattttgttttgtttgtttttttatttgagttttttgttgatgttatgagaggtttgattatgtgtttaggaggtataggatagagtttagagttgtttaagaatatataaggttgaggtttgggttttgtatttgggaagggttaggaagggttaaaggaaaattttagttgagtataatggtttatgtttggaattttagtattttggtaggttaaggtaggaggattatttaagtttaggagttggagtttagtttgggaaatatagtaagattttatttttataaaaaaaaattaaaattaaaaaattaattaggtatggtggtatatatttgtagttttagttatttggtaggttgagatgggaggattgttgagtttaggaggttgagattatagtgagtgggatattgggttattgaattttagtttgggtgatagagagagattgttttaaaaaaaatttttatattttatggagtttagtagaatttttggttagggtgttttgattgtgaaatgagtgtggtagttgttaatttttgagggtgaagatttatttattagtaatttgtattttggtatggtgagaggaagtgtttggggaaagatgttggttgaggtagagagtttagtttaatttattgtggaggagttattttagttttaaagagaaagattaataaattttaggtgaatggtttaaaagttatttttgtatatgtagagggtgtattttgggatatgtggatatttttttttaggataggaagtaaaattagtaggtagagatgtgagtttttttgtttttgttggagttaatttggagtttttattttggtttttagggaagtatagatttttatttttattgtagttaaaagattttttgttgatttttttagtagtatttagtttagttttgtggggagaggtggtagggggaggagatagagaaagatgagtttttggtagttgtgattggggggagagaaatgtggttttaatttgtttttgtttattttatagatgggtggtgttttattttaaaatttagggtagttgagggattgaaggaagagggggatattttttaattggggtttttttttattttattttatggtgttttatataggaaagagttggaaggttttgggtttttggtatttagttaaagttttaggtaggggtttagatattgggttgtgttattattttaggtagtttgggagttagtgatggtagagttttatttttattttgattattgtatagtattttgtttttaggatagtttagtagttaggttgttttagggtttaaatttagatatttaattgtgggggttttaggtaagtggttgaagttttttgtgttttgattttttaatttggaaaatgggatgatgaaagtaattgttgggtagggtaaggggtaagtgaaagttagtgtttgagagtgatgtggttaggattgttgttgtgattatatattgagttttttttttttatttgagataagggttttattgattgttgttagaaagatttagatttagaaggattaggaaagttgttttatttataattttagagggaaggggaggtttttgtgttagttggttgttgtaggggagagggtgggagatagatgggggatagaggagtaggggtagtaggaggaatggttggtagggaagtttgtttgagatttaaaggattgtttattaggaggatagtttaggttttttttattgagaaagatttttttggatagttgggttgaggatttttaggttttttgggtggagtagaattagttattattgaagttatataggtttgtaagtataagtgggggattgtttaggtatttttgttttataggggttaggtattaaggttagggtggttagaggatatgatgtagtttagtaggggttttgtagaattattagttaagaagatatatgtagaagtatgtaagtgttttgaggaggtaaattttttgttggattgaatatggggagttgagtttttaattattgagttgggttgtttggtttgtttttttttttttgaatagaaggtttttagatagagtagttaggtaatagtatggttaagtaggggtttgtattttagttttgttttgtagtttgattaggttgttgtttttttaggagatatgggattggttagggtttttttaggttgttataggaataaggtagggttgtgattttttttatggtttaggtatttgggggagggattatgagttttagtttaggggatagataggaaatggatagtttgttttttttttaattatggagttggttttttttttattgtattttttttagttatgttttttattagaagattattgtatttaatgggtggttttgtagtgatatttagtttaatgaagttatttggtgggggttttgggggatgtagttttttgaaatatatatgggtagtgggtgagttggaggttgtgtggggttttgttttttggggatggttaggaggtgttttaattatttgtaatttgagtttatagtgattgggatttgttgtttttttattttagtttttttttattagtatttgttaagtgttagttagtaggtgttggtatggtttaaggtaggtttgtagttagattagtattgggggagggattgggagagagatttttagagtggaagttatagttttttttttttttaggttgggtaatagattattatttttagttagttttggggaagggggaggggttagttgggttgtaggtatagtgttggggttttttgaggtggttgttgttgattatggttttttttttttttgggttgggtaatagattattatttttggtttattttagggaagtgggaggggttagttggggtataggtatagtgttggggtttttgtggtggttgttgttgattatgggtttgttattttttttttagttgggttgttattttggttttgaaagtgttttttttagtttttaatttgtgtttaggaggtagttgatattttaagtgttgttatagtaggaggttgggtttgtaagtgtgatttgtttggggaggggtagagggaaagattatttttgtttaaatagtggttttttttttttttttgggggtttttatagggtttttagtttttttttggttaagaggtaaggagaggtaggaaagttttaggaatattggtagagaagagatagggtaggttgttagaggaagtaggttgtagggtgtttaaggttttaggttgggttttgggaggttagggtatgggtaattaggaggtttaggtagggaaatttgttttgtagggattttgggagataggggagaggggatatgatagttgttttttgttgttttttggttgtggtttttaggggttttagtttagattagaagtattttatgtattgggttttggtttagtttggaagtatggtttatagatttatatgattatttgggtagtgatttttaaaaggttttttgttattagttggggagtttttgaggggagggtggttttgtagagtatttggagatattaatgggttgtgaggaaaggaggaggtgtggatatttttatggttttaagagaaaattaaggtagagttggaggttgggtgtggtggtttatatttgtaattttagtattttgggaagttgaggtgggtagattatttgaggttaggagtttaagattagtttggttaatatggtgaaaattggtttttgttaaaaatataaaaattagtttgttatggtgatatgtgtttgtagttttagttatttaggaggttgaggtaggagaattgtttgaatttaggaggtggagattgtagtgagttaagatggtattattgtattttagtttgggtaatagagtaaaattttattttaagaaaaaaaaagagtagagttggaggttaggtggtttttagagtttgataaggaggttgtggggttgggttgtttttttggttatttgaggggtagggattggtttagtttgagttttagatttataagaggttgaattggagtgggattttgagatgaggtagggttattttgtttatatttgtgtttaggttttaatagttattttttttaggaatttagtttgatggttttttaggttgagaggttgttaaggggttgtaaggtgttgtaatgtgtgagttggtgggttttgatgtgtgatagtttggggtattttttttattgttagggaataggaatgaggagttttttatttttagtgtttggtaggtaggaggttgttattggattgtgtgtttaggtgttattagattttgagggtttatggatatggtatatgatttttaatgattaatgtttgtgtagtaggtgttgaggtgttttaattttgagtaaggttgggtttttggaattttttttttggtaggaggatttgtagttgaggaatttttaagaaattttttggtagtaaataaagtatggggttggatggtggatttatgagtgtttttatatgaatgtggatatagatagaaaagatggtaaatatttgtgaataaaaggaatggtttttgtgtattgaatttttatttattggtttttgtttggtataaagtttttaggaattttttaatagttttagttagaaatgtgtttttgtttggttatgtggaaaattttatatatattaagatatatgatgtttttggttttttttatgaatgttttatgttttttgggtttatgatttggaatttgtagatttttgttgtttttgttttagagttataaggattttggatgtaggaaatattttttatgtgtaagggttttttttttttttgttagggtttattggtttttttttgtttataggtgttatttaaatttttgtatttgtggttttttttttttaattattttgtgtaatttgttaatagtttttttatttttagagtttggttgttggagatatataaggtatatagaatttgtgaaatgatattgagtatttattaggtatttattgtgtgttttgtttggtaataataagtaaaattataatgttttgggtatatgagtatatttttttatgtttatttttttagtaatttaatgagatggttttataaatggggaaattgaggatagggaggttagattggtttaaagttataggttaggaggggtagggttaaaatttaaatttagatagtttggtattaaattttagttttttatatgaaaggtattttgtaattttttgagaaggttgggattattatttttattgtatagatgaggaaattaagatgttaaatggttagatagttttggagttaggaggtgggtttagtggtttatgggagtatatggaatggagtttatgggaggtttgaggttgggattttgtattttattttggtttaagggatgaggtgattgggagtgttagagatattttgggattggttatttaggtgttttgtatttagttttagtgttgagtgggtgagggtggataatttgttatttagtagggttgttgtttgtattttggtggttttttaaagtttggttaagtaaagtaagattgtttttggattagagtgatttttaagttatataagtatttagttatgttttggaggatgtaggattgggaaggttttttttttattgtatttttatttagtttttttatggggtagttggttttaggtatagattagatgtttttttttttgtttgttgttggtatgtttttggttttattgttgttttagggaggggtttaagagttttttggttttgttatttattatattttgtttagagggttgggggtttagtattaatgttaagtatttagtagtaaaattatgggttggaaagagttatagtgttgttttgatttggttttattttatattgggtgttgtttttattagtttttttttgtttttggttttattttttaggtattataagttttgtaggtttaaagttaaatttattagtttttgattttttttagttgggattagggtgaggtttttgtttaggtgtaaaagttaaggtagtgttaaaaaatttaggaattaaataatattttgaagtaatattttaaataaattaaattttatgttgaataaattttgatagggttgtgtatgtgtagggttgggtttgttttaatttaaaattttaatatttgtttattatagagattattatgtattattttgatattgaaaaatattgtattaaatattatttgtgttgatttttgagttttttggtgtttttttatattttgtttttgataagtgtttgatatattttgttttagttggttttgttttttaggtgtttttttggggttgttttgtttatgttttttgtagttattaggagttattgagttattgtatttgttttattttgttttttatgtttttgtattgtttattttgttatgttttttttgtgtgttttggttgtatgttagttttagataggagtttggtgggttgggagtttatattaatgttgtttttttttggttttggtgttgggtatagggtagtattggagatttttttttttttttttttttttttttttttgagatatagttttattttgttatttaggttggagtgtagtggtgtaattttggtttattgtaatttttattttttaggtttaagttttgttttttggaattaagtagatttttttgttttagtttattgagtagttgggattataggtatatgttattatatttagttaatttttatatttttagtagagatggggttttgttatgttggttaggttggttttgaatttttgattttaggtgatttgtttgttttaattttttaaagtgttgggattataggtgtgaggtattatgtttggttgagattttttgaataaataaatattattggtatggagatttgtttagggaatttgtttagattttgttattgtatttttgtttgttgtgtttagaggtaatttagggttgttttagttgtttttatttggttattttttggtttttatttaggttggtttgttttattttgtgggttaagaaaatgatttagtgggtggtgattagtattttttttttaatttgaaaagaatatatttattagtggtggtagtaatttaatgttttttagttgatgaaggtaatatgtttgtttataatggaatggtttatgttatggtggaatattatttagggatgtattggtatttgttataatgtggatggattttggaaatatgatattaagtggagaagttagatataaaggttaaatgtgtaattttttgtataagaaatgtttagaattggttaggtgtagtagtttatgtttgtaattttagaattttgggaggttaaggtaggaggattatttgagtttaggagtttaagattagtttgggtaatatggtgaaattttatttttataaaaaatataaaaattagttgggtatggtggtataggtttgtagttttagttatttgggaggttatggtgggaggatggtttgagtttgggaggtggaggttgtagtgagtagagattgagttattgtattttagtttgggtgatagagtgagattttattttaaaaaaaaaaaaaaaaaaaaaaagaatttatatagataggaaggaaatatggaggaggagggtaggattgatagttaaaggttatggggtttttttttaagaaaaaaattttttaaattttttaaatttttaattttttaaaattggttgtggtgatgatggttgtattattttttgaatagattgaaaattatggaattatgtattttaaatgggtggattgggttatgtggtgatttatgtttgtaattttagtattttgggaggttgaggtgggtggattatttgaggttaggagtttgagattagttttaatatggagaaattttgtttttattaaaaatataaaattagttgggtgtagtggtatatgtttgtaattttagttatttgggaggttgaggtaggagaattggttgaatttaggaggtggaggttgtagttagttgagatggtgttattgtattttagtttaggtgataagagtgaaattttgttttaaaaaaataaataaataaataaattggtggattgtatagtagtttatttggattttaataaagttgtttaaaaaaaaatgaaaaaaagttttttttttttttaaaataaataaataaaaagaaaaaaagagagaggggaaaaaaaaaaaaaaaaagaaaatattgagtgtagtatatgtatggtaaaggtaagaattttattatggaaatttggttttattaatatattttatttttatttttattttatatataggtgtgttttggtttgtggtgttaattgtatgtttttttggaggttgtagtttagattggttttgaaagttgttttttgggtaattttaaattttttataatttttgaagtttttggtttgttgggattatttagttttttagatttagttttgttattatttatttaagattgtagttttggggaggggggtttttttttaagggtgtaggggttttgtggttttatttttttttagaatatatattattttgtattgtatatatgtgttttaatatggagtattttaggatgttggttatagttagttatgtttgtatattgattgattgattgtgttttgttgattaattatgttaattattgtgttgtatattgtttttattaagtgagttaaagtaatttttttggaataagttgatggattttaaataagttaaaagatatttttttaggaaaaaaatagtaatgaattttaagaagaaagaaaaatttttaaatttatagatttatggaaaaagtttaagtttttaaagtgttagatttttttaaaagtattaggtttagatggttttatgagtgaatttttgaaaagttttaatagagagattattatgttgttgtttaaaatgttttagaaggtagagggtaaaagaaatgtatttaaattgtttttgttaagttagtataatgtagatattaaaattgataaaaatagtatatatatatatatatatatatatatatatatatgttttatttgttttagattaagtttgttgttgtgtatttaagtaatattatttatttttattttgttgttgaaattaaaatatattttaatggatttatgattttaatatgtaaaaatgaaattatagaagtattagaagaaaatgtgggtgaaatttttttttataattttagaatgtaggagatttttaaataggatgtgaattttaaaagttaaaagggaaagtagagatttgataatattaggattaaaatgttttgtgtagaagaatattttagaaataaaattaaaagtaggtagttggggataagatatttgtatttgttgtgataaagatgtataaataatttttttttttttttagataggattttattttgttatttaggttggagtgtagtggtatgattatagtttatagtagttttaaatttttagatttaaatgatttttttatattagttttttgagtagttgggattataggtgtattattttatttagttaatttttgtagagatgtggttttgttatgttgtttaggttggttttgaatttttaagtttaagtaatttgtttattttagttttttaaagtgttgggattataggtgttagttattatgtttggtttataaagaattttttttaaaaaattttaataagaaaaggatatattttttaaatgaaaagagaatatagggttttggtttataatatatgaagagataattttttttgtttgattgagatgtataaaataaaatattaattggagagtatttggtttttagttaggggtaaggggtataggatttttttgttggattattattgtatagggtttagtagatagttgagtaggttgatgaggggaggggttttaaaaaattttagtaattattttagaggttaatttaggaataaggattaattttttttttttttttttttttttgatagggagttttgttttgttatttaggttggagtgtaatggtatgattttggtttattgtaatttttgtttgttgggtttaagtaagttttttgttttagttttttgagtaattgggattataggtataagttattatgtttagttaatttttgtatttttagtagagatggggttttattatgttggttaggttggttttgaatttttgattttaagtgattagtttgttttggttttttaaagtgttgggattataggtgtgagttattgtgtttagtagattaaaatttaaatgtatatatttttgatatagaaatttattaagagtttattttttagttatgtgtgtatatgtataagtgtgagaatatttgttgtagttttttaattatagtgggaagttggataagtttggtagggttatgggatagttgatgatataattattaaaaggaatgtgttattttgggaggttgaggtgggtggattttaaggttaggagtttaagagtagtttggttaatatggtgaaattttgtttttattaaaaatataaaaattagttaggtgtggtggtaagtatttgtgattttagttatttgggaggttgaggtaggagaattgtttgaaagtggaaggtgaaaggtggaggttatagtgagttatagtgagttgagattgtattattgtattttagtttgggttatgttttgttaaaaaaaaaaaaaaagaaaaagaaaaaggaatgtgttatatttataagtggtaatagtgttgttaaatggaaaaaataaaagttggtagtagaagtttgattttttttgtgtttttgaaaagtttatatttatatattgattttttttatataagttttgaatgattttgtaggaataaaatttaggagaatgttatatttagttgttaatatggttattttttgggagagagttggggaatgggagagaaaaatttttttttaaattttatgtgatttttattttttatttaagaatgattgggtattgttttttttttttttttttagatgggagttttgttttgttgtttaggttggattgtattggtataattttagtttattgtaatttttgttttttgggtttaagtgatttttttgttttagttttttaagtagttgggattataggtgtttgttattatgttttgttgtgtattgttttttaggatgaagaaagggaaaggttatagggagaatgggagttagaatatagagtagggtttttaaatattagtttgtgggtgagagagatatggggtgatattattggtttggaatttagggatggtatgaggtgttgtttaggggttttagataaggtttgtttgttgattaagtaagggttgtgttggtttttgtttatgtgtttgtttaatatgaattttttaggtgttttattttgttttatgaattattattgtttattttaattatgttgtataggaagaattgtgtttatttttataatgagaaaatggattagagaggaaagttattaggtagggtaggggtggtagtttaggtagtgtgagggtaaagttggtgtttttttgttatttttttatatatgagtgggtaaggtattataggagtttatattttaatttttgtgggttattttggaaggtggtagatggaattagtgatttttagggttatttttagttttaggttttagataggggttgtggagtggaattgagtttgatttaggtgtgttgatggtagttatgtaattgtggataaattatttttttttttatttgtattggatgagattgggaatttttattttgggttttttaagagttttggggttttatagagtatatttagtagtagtagtgggatggggggatagggttaggggagttttatgttttttttaattttaattagagtatttttattttaatttttttttgggtttagtgtttagagagaatgggaaggaagtttagttttggttatgggttattttagtttgttagttatagtttatattttaggagttttttttggattgaaggagatagagttatttataatatttatagaaaattttggagaggaagtggagtttaattgaggaagtgtttttttgtagtttttagaaatgaggttataggtgagatagtgtgttagggtggattatatggtatttttttaggttgtttgttggaatttagggtttggttaggggttgtttatattttgggttttgaggtggggagtttgagtgtgtttttttagggttgaatgtgttttttgtttatattgtatagagtatggttgtttggttgtggtgtgtttttttggataggtttgttattgtgtagatttttaattttggtagttgttttgggtttgggaggtggtgggtatagatatagttttttttttttttggtagttgttttgattttttgggataagtgttgagaggtggttttatttagtgttatgtgtttgggggttggggttttattttggggttaggttgggtggttagggttatagagttgtagggggtggagtagagaaattgtttttagtgtttgttttttggttttatttttttttgtagttgtgttttatttaaggtattttatagttgtttggtatttgttgtatttttggattagtttttttttttttttattattgtatggtgtttggtaggttggtgaggggaggggttttttttttgggttttggagttaggttttgttttttggttttattttgttttattatgaaggagatatattgggtttggttaatttttttgtattgatttttgtttttttagtatatgtgggattttttattttagatttaggtttgagaggttttagggatagtttggagaaggagggtatttgtttttagaaggggaaagagaaagagatttaattttaaagtaaaaggggatttgggtgttttttgtaagtagtttaggaaaatgggaggaggtgggagtagtgggattttttgagtaaggtattttggtaggaatgttagtgttttttggatatttttagaagtagaagtatatagttttatagaaaaattttgtaggtttaggatttgaggtatgatatgatttaaatttattgttttattagatattagtgagttttttgatgtttattaaggttttttgttttatatttggtattggatgaatttgtatattttgttttagggagtttatagtttagggataggtttagagtttatgtggggtgttttgtaaatatggggttagaagttgggttgtttatggggttttttttttttaaattatagtggttattttttttttaattttatagtttttgatttttattaggaatttttggggtttagtaggtgttttttttttgtaggttgatgtttgttttttttattttttatttaggtttagttttgattttattttttttaaagttatttttttattgttttgtgttgggtggttttagggagttttgtgttttgattaattttatatttaatgttgtattggtagttttgttgtttgtgttgagatttttttttgttttgtttttggaatatatggtttggtgtggattaagtatgtgaagagttatgtttattattattagtttgggggggtttgattttttgtttttttaatgttttatttatatgataaagatttttagattttttgggttataggaaaattattgagatatgttgttatgtttattttgttttaattttatatttatgtttataagtggttttagaattattgtggattttttttttggtttttggggtgggtggatatatgagagtttagtttttagttatttttgtagatgtttttttgatagattaagaaattgaggttgggaggggtggaatgatagtttagaattagttgatttatggggtagagttgggatatgtttagaattgagttgggtattgggtttggttttttttttgtttttagtgagtattttaagaaggtagagaattagatttatgaatgagtgttgagtatttgttttataaggtagttttggagaaatttggttggtgtggttgaggagttggaggggggtaattttggtggggggggttttgagttagtagttagtttttgtaggtttagtattgggtgttgtagtttagttttattttattttatttagaggtatttatgttggggggtaggaaaagagtagggatttaggagaggaggtaaggttgtttttatttagagtttgagaggattagggatgattttaaaggatgagtgtttttttgtgggaggatagtaaggagggtgttaagtttaggggtagggttagagttttggaaattgagaatttattttattagtataaagtttagattttattaggttttggggtggaggagtaggtagggatgtttttgttttttgtagtgttttttttttttttttttttttttaattatttaggtgtttatatttttttttgaaatgttgattttttttagaatttttatattgaagttaatatttatttattgagttttttagtataatttttagaggagagattaggtgttttgggggtaaagttgattaggaaagtttttgtttggtttttagggatgatttatgggggttattatatttgtttataagaattataaaaaagttattttaatttattattagtggtttatttttttagtataattttatggtatatttattatgtttaagttatttatttggtattttatgggattttttttttttttttttttttttttgagatagggttttattttgttttttaggttggagtgtagtggtataattttagtttattgtagttttaattttttatgtttaggtggtttttttattttaatttttttagtagttgggattataagtgtatgttattatgtttggttaattttttgtattttttgtaaagatagggtttttttatgttgtttaggttagttttaaatttttgggtttaagtaatttgtttgttttggtttttaaagtgttggatttataggtatgagttattgtatttggttttttatgggattttttataaaaattaagataggttgggtatggtggtatgattttagtattttgggaggttagggaagttgaggtgggtgggttatgaggttaggagtttgagattagtttggtttatatggtgaaattttgtttttattaaaaatataaaagttagttaggtgtggtagtttatgtttatagttttagttatttgggaggttgaggtagaagaattgtttgaatttgggaggtagaggttgtagtaagttgagattatgttattgtattttagtttgggtgatagagagagattttattttaaaaaataaaaaataaaaaaaaaatataaaaaaaaataaagataatagttttatttttagaatttagtgggggtatgaaaggaattttgaagattatatagtaaaattttaagtatggatattgttggtttataggtgaattttaggtttttttttatttttgtattttttgtattttaaagaaagggtatttgattattttttatgatttgaaaaattatttttatatttaaaaaaaaaagtttagtagaggaaagaaagtttatatataaattatttatattttaagttaaatatgaggtatttggattaggttttgagggatgtataggagtttattaaggtagtgatgtaaagagaagtagaggttagggtttaggaggttagggtaaaggggttgtgaggaaaggtgtgagagattaagggaagattaaagtaggagaagttgggaaggagagaggtgtgagttgagtaggagagtgaattaattgtggaggggtttatggtgagtgagtagagaaggtttagtatgggaagagattttagtagtgttgtgttttggggaagttagtttgggagtaatttagttggggttttaggagattttgttttgtatttatagttttggggtggagataaattatagtatagatgtttttttgtaggtagaagttaaggggttgggtgtttgtttagagggtatggaattttttttatgatttttttttttatggtgttagttggatttttggtgtttgggggatagaggggttgtagagattggttagagttgtgtatgttggggtttagggaatttttagtttagttttatatggaggggtagaaggggatgggtttgaaggaaagatgggtaggaagttgagttggagagaattggatttgtgtttagaatggttgtgatatagagagggaggatggagaagtaagtaggtggtgttttggaggaagaattagtggggtttaggtttgggttttttgagaagttatttttattggattttaagagtatttttttattgggaaggttttgtttttgtttgtttttgtattttttttatttggatttgtttaggtttttaggattgttagtttagtttatggatttttttatgtgagttggatttttatttgtataggtttttgtttgtgggtggttgggtttgggatgttgatggtttttttttatgttttggttttaatgtgtatattttattttatggagaaagttattgtttttttagagtgttaggtttttggtagttttgaatgttgttgtttttatgtggtttgttttttttttttttttttggtttgatgaaattgtatttttattgttggggaagttttttggatattttttgtgttttagttattttgtttatggtttggtgagttttagaaagtagagtttgtaggttgtgtttttgggtttggtttttggtatagtttttggtataatttaggggttaaattgtgtttgtttttggaggagaatgtttttgtatatttttatggatatttttttatttgttttttagagttaggattatgtttttgtgtatttagtattagttattattgagatttagatggtttggtgataattgtttttttagttatattttgtttgatttagttgagtgtgaatatattaatttaggatgggggtgtatttggtatgttaaataaaggttttgtattaatagaaggtaggggaggaaatagttttttgttattttgtaaattgtttatgtttttggtttgatattatgttattagtaattattgttattgagtttgggtggttggggtagggtggttttttagagttaagtttagagagatgggagagggaatatgggatttgtatattgagggttggaaaggattttttaaggtttattagtttttggttatttagtgtgttttgatgttttttttgtaggaaatgtagagttttaggttttagatttgttaagataaatgtgtattttatatgtttatgaaagtatgaggagtattggtttttttttaaatttatattttttttaggttttatatttttttagtttttaagtttattgattattggagaatttttatttaaaaagaaaaattaaaaaggggttgggtggtttatgtttataattttaatattttgggaggttgaggtaggaggtttatttgaatttaggagtttgagattagtttgggtaatttagtgagaatttgtttttataaaaaaaatttaaaaattagttaggtatggtggtgtgtaatttgtggttttaggtatttgggaggttgaggttggggaattatttgagtttagggggtagaggttgtagtaagtagtgattatattattgtatgttagtttggaggatagagtaagattttgttttaaaaaagttaaagaaaagttaaagaagatggaaagagggatttagagagatgtggaagtaatttaagggtttattgatggaggaatagttatataatataagtgtattgtataatagaatattatttagtttttgaaaggaaggaaattttgttttatgttatagtatgatggatgaatttttaggatgttatgttgagtgaaatgagttagatataaaatgggtagttattgtatttttttatatatataaggtttttagagtggttaaataaatttataataaagatagaaaatagaatggtggttgttagtagttgggggaggggtatggggagtttggtttaatggggatggagtttagtttgggaggatgaaaagggtattggagatggatagtggtggtagttgtgtaatattgtgaatgtattgaatgttgttgaaatgtatattgtaaagtggttaaaattgtatattgtatgttgtgtattttattatggttagaaataagaagtagtagttaaattaaaaatttagattgtgttgtttgtttaatttaaagaaggtttattgagtattattgagttttgattttgtgtttagaattagatttggtttttgaggggtttttaatttagttggtattttattatagttttatggagttatgatttttgttggggttagggggtatgtttttgagaagggatttaattatgttttatagtttggtatttttaaataggttttgtgttttataggattggtattaattttttgtttgtaagttttatgttagtatggttgtgggtttgagtttttttaggatgttgttggagttttatggtttttttttttttgttagaagggtatttttaaataaaattgtgtgtagttattatatagttttttggtttaggtatttttttttagtgttttgagaattttgttttgtaggttaaggtgttttttatgtttttttttttttgttataattattttttttgggggaggaggattagattatgggttttaatgtaagttttaggaggtatatgtttttttttttttttttaagtttttggtttttgttgggtatatttaggtagtttgtaattttttaagtaggagttattagaatgtgatagtttttttaggggttttaattttattttgttttatatttttgtatgagtttgttttggtttttgtgtggttttttattttttaagttttttaggttttttagggatatatagtagatagaggttttagtaaggtttatggtgatttataaaggaggttttttgaaatttagaaaatttttttaaatttttatttaagttttgtttggggtattttggtatgtttttattagatagagagagttattttttttgagtttgtagatttttatttttatgtattttggtttttttgggtttttagggtagtattttttattttatatttagtttttttttttaagattttgtggtaaagttagtaattaggttttttattattatagtatttaagatttagtgttttgtgatttatttttttggttttggggtgtagttttagttatagggggttggggtttgggttttagtttgttttgtagttgagatataggggtaggttttgaattttttaaggtttgggttgggttgggggtggtgggtgttttagtaggtttgggtatttggatttttatttttttgggggttgtgttggtggtaggggtagtgggtattttggggattttggaggtagggggttttattttttggtgggttgatttttggggtttgatgatggtgatttttgttttttgaggggttggttttggtgttttgtggtttaatattttggtttttttgagtttgaattgggatgggttgatggttttggtgttttttatttgtttggatgagatgttaatggatagtttagtgtgttgggatattggtttggttgttttggggtttgagagttttattttttgtagggatgttttgggggagtgttggtttagggagtttatatggtgggttgagggttttgagttttttatgtttaggttttggaatttttgggtggagttggttatagtggtttggagtaggggagtttggattttttggggtggggtggagttgggtgttttgatttttttgattttaaaagatttttttaaggttgaaaaataaagagaggggatgtaattggtgaatggatggttagggaatattttggtatgttttttgttaaggagtagtagaggaaggtaggtgatgtggtggtgagggttgggggtttttttttgttttttatgttttagtaagtggaagggatagttttattttaggagaattattatgagttttggggtagagatgtaggttggagtgggaagatgttgtttgttgtgttttgttatggttatggtgtaaattatatagtttttttttttagttatgtttatataggaatgttttagttttagagaagatttttatttttttttttttttttttgagatggagttttgttttgttgttttggttggagtgtagtggtattttttgggtttaagtgatttttttattttagtttttttagtagttgggattataggtatgggttattatgtttggttaatttttgtatttttagtagagatggggttttattatgttggttagtttggttttggatttttgattttaagtgatttatttgttttggttttttaaagtgttgggattataggtgtgtgttattgtgtttggttttgattttttttttgttgtggttgtttttatttttttttatttttagttaaggtatatattgggatattattagtaaatatatttttattattagttatagtgggggatatgtttttaataataagtgattgtaattgtaattaattagaattgtagtaggaataaaattttattaatgatattaagggtggatattggagtttttagtgttggtgaggtgttgggtttattgagtttattatatttgtagttgtttaattttgggatgtaaagaatattagtatttttagtatagatggggaaagtggggtatggggtagatatagagttagattgtatattaggttgatattagagtttaaggttttaattatttggttgtttggtttttttagtttagtttataggaattaatttttttagttattagttttttttgtatttttttatttattattataagtttgtgtagtgatgttaattattagtttttgttttgtagttattttgtttttttattagggtttgtttttttggaggtagtggggatggtatttgggaagttgttatttttatagtttttataattgtattttaaatgagagttagttgtttttggttattagggttagagtagggagggatttatatggtaggtatatttattagttttttttttaggttagatttatagtgtatttttgtggagatttatagtgtttttttagttgttttttgttttattaggttatagagtttgggttttatgggattttattattgttttttttgtttataggaaaagggatgatagttggtttttagtttttaataatagtgttttaggattaattttagtgttttttttttatttgtttttttttttttaaatgtatttaggtattggggaggggaagaggaagtttaattttttaattttggttgttttagttgttagttttttgggtaaggtatttttgtgggtgttttttttaagttataggtattttttttttttggtggatatagatgaaattttgggttattaagtttaatttttattagaagttgggtaaggagttgtgtggattttagagaatttttagttgttataggttttgttttagttttgttattgttttagaggatatgggtttggtgtggttagagttgtttattttttaagagagtagaaatttggatttttatatgatattttttgatttttaaatgttggtataaagtaaaataagttttttttaaaatattgagtagtttggttgatgtggtgaaattttatttttattaaaaataaaaaattagttgggtatggtgatatttgtttatagttttagttatttaggaggttgaggtaggagaattgtttgaatttgggaggtagaggttgtagagttgagattgtgttattgtatttagtttgattgatagagtgagattttgtttttataaattaaaattaaaaataaaataaaatattgtagggttaaataaaattaaatttataggttgtatttgtttatgggtttagttatgatttttagttgattatgtggttgtagggtagtaggatattgagttttagagttaggggtgtgttaggtgtgggtttttgatatggtgtttttttgtttttttgtattttgtatgtaaattgttggttgtgttttgattttgtagaagttttagggttttaaggaaaggttgaatgtttatttttattagttagaaagtttagggtttaatgtttagaattgaatgtaatgagatgggtttattaagtttattatatttatatttgtttaaatttgggttgtaaagaatattattattgtttttgtatagatggggaaagtgaagtatggggtagatatagagttagattgtatattgggttgatgttagaaagtgtagagtttaatgtttgggtttttgtgtggtttttagggttttttgtggttttttgatttgttttttgttttttgagtattgtttaaattgtttttatatggtgtgtttttgttttatgggtgttgtagagtaggggttggtttttaggtgtttttagtatttttttgtgtggttaagttggagaatagaaattagataggagaaggttttgttttaggtttaatttaagaaaataaatgattttttttgggagatttggtgaattttttttttgggagtttttttggagttatttttattatggttaatttatgattgaagatattgtattaaagtagaggttgttttggtgtgagtttatgattgagtttatggtgtggatgtaatgatttattttagttaggtttatgtgtataagtggattattttagaattggagttggttttttttttagggtattttttttttttttagttgtttgtgtggttggtgttttattattttggttatttgtgtaaaatgtatatgtgtgttggtttttaattattttttttttttttttaatgtttggtgtttttttatggatgggtttttttttttttattagttggtttttgtgtttattgtttggttttatgatttttttgggtgttttggtttagtattatttttatgtttattagtttttagtaagttttgagatagtaggggttgttttatttgtaggggttattttattattaggatggtgttgtttaaaggtgagtttgttttagataatagttaggagattttatagtttttagaattgtaagagaatataattgtgtgttagaagaatagtgagaataggaggtgttttattttggaggtgtttattttttttaggagatgttttattttgggggtgtttattttttttaaggaaattatgttttggttggaatgttaagaaggtgatatttaaatgaagaggtgtttattttggtttatgttatttttttaaatgagtatgttattgtttttttttttttttgggaattttttttaaagttaagtttattttagttttttttttggggagttggttttttatatagtttatattattttttttttatgttattttggttatgttatgattgttgagattggttatgaggggtgtgttttggttttttgggaatagagttgaatgttttttattttatgatattatgtttttattaggttttaggtgtttttagaaaatttattaagttaggtgtggtggtttatgtttgtaattttaatattttgggaagttaaggtggatagattgtttgagtttaggagtttaagataaatttgggtaatatggtaaagttttgattttattaaataatataaaaattggttaggggtggtggtatatgtttgtaattttagttatttgagaggttgaggtgagaggattatttgaggttaggagattaaggttgtagtgagttatgattatattattatattttagtttggatgatagagtgagattttgttttaaaaaaaaaaaataattaaaatttattaaatgttaggtgtggtggtttatgtttgtaattttagtattttgggaggttaaggtaggtttaaggtaggtggattatttgaggttaggagtttgaaattagtttggttaatatggtaaaattttgtttttattaaaaatataaaaaattagttaggtatgggggtgggtgtttgtaattttagttatttggaaggttgaggtagaagaattatttaaatttgggaggtagaggttgtagtgagtttagattgtgttatagtattttagtttgggtgataaagtaagattttattttaaaaaaaaggttggattataggattataggataggtataagttttgagggagtttttaaggaggagggatgtattagatttttatttttattttagtttgtgaagatttatttttgtttgaggttttgtagagggttgattagtgatttttaaaaagatatgtttaatatttaattttaagaatttatgaatgtgattttatttggaaaaagggtttttgtagatgtgattagggattttgggatgagattattttggatttgggatgggttttaaatttagtgtttggtgtttttataggagaaaggtagaaggggatttgggatataaagagatatggtggggagggttatgtgatgagagtagagattgtagatgttgttagagttaaggagtgtttgggttaatgtaagttggaggaggtaaggaagggttttttttttgagttgttggagggagtgtggttttgttaatattttgatgttaaatttgtggtttttagaattatgagtgaattaatttttgttgggttatttggtttttagtaatttgttttagtagttttaggatatttataatgagatttttgggaagatgaaatttttggttgtatagtggtttagggtgaggttagttggtgtggttatttattttttagtttagttttaattttattataattatatttgataaatggtttattgtgggttaatggatatgtggttattttagagttgttatattaggagtttagaggagtgagagttgtttttttttttttttttggagttgtataaaaattttagatggttggagaagttattggaggaattatattattttagatttttgttttattgttgggatatgtggtaatgaaataagattatttttgttagggatgttttatgggtaattgtttttttatggaggatattgtgagttgtatttagttgggaaatattaggagatgtttgttattaggttggtagaatagggttttttagtatttttttttttattagagttttaagattgtgttttgggttttgtagttatatatggttgtttttttttttttaatgtgtaggttttttgggaagttttttgttattatttttatagtggaattggtataatttgtttaggggtagtaggtttttgttattttatatgtttttattttttttgtggagggagatgtagttaaggggtatttatatttatttatagaagtgagagtgtttgtgagtttgttattttgtagattttagaattttgtatgtgattgtatagatttataggtttaattgggtagatttaaaggatttatgtagtagggaggagtattggatagtttttttttttgtttgtaaggagttaatgtaattgaaggatatagaagaggtttttagttgagtattataattgtggattgtgtatagtgttagaaagatgtggagttaggttatgttgggaggatttttatgttgttattggaaggtaaagtagtgttatttttttatttatagagtaggaggtttttatttttgttagttattttttttatttgtgaatttaagttttttaaagttagattttaattttgtaagtttttaaaagtttttttgggttttttttttaatttttattgattttaatttgttttaaaagtttgaagattgtttatgtgttttggtttatttttgggaatttattttaaggaaataattagaagtatagaaagatttatgtatgaggatatttgtattagtattaaattgataaaatttggaaatagtttgggtttttgtagattttttaaatttatatgttaaaggtttgtattattattaaaattatatttttgaagatgagaaatgttgagaatattaagtaaaaatagtaggatataagatgtatataaagattttaattttattttatatatatatgtgtagtttgtatgtatatatatatttatatttgggtagaaaataatgatttttggatggaatgaatggtggtgggtgttgtttattatatttttttgttttttgagatgtttatattatatggggattatttagtatgtttagggaataaaattattgatattgtttttttttttttttttttttgagatagttttgttttgttgtttagattggagtgtagtggtgtaattttggtttattgtaagttttattttttaggtttatgttatttttttgttttagttttttgagtagttgggattataggtgtttggttattatgtttggttaatttttttgtatttttagtagagatatgattttattgtgttagttaggatggttttaatttgttgattttatgatttgtttgttttggttttttaaagtgttgtgattataggtgtgagttattgtatttggttaatattgtttttaaaaaatatattttggtattggttgggtatggtggtttatatttataattttagtattttgggaatttgaggttagaggattgtttgagttaggagtttgagattagtttgggtaaatggtaagattttatgttggaaaaataaaattaaaaaaaaaaaaatatatatatatatagattttgatgttaataagttggagggtgtgggtaattgtatgttggtttatttttatttttatttttggaaaaatattttatagtttaggatgggtatagggttttttttatttttaagtatttatggttttagttgttatataaaaagaggttatagtgggttattttttagatgtaaatttttttttttaggtttatggtggggttgaaataggagtagtttggatttgggtttatttagagaggaatgtgttgtataagggattattgttaaggtttttgttttgattataggttgtttggtaaattgtttttagtttttgaaattagattaagtattttttggtgtatatattaggttttagtttggggagggaatattaagtgagttatagagttttgttttagtttgggataaatgttatgtaaagaaatggtagagtttaaggttagaataattttatgtgtagtttagtttttgtaggagggagtaatgtggtttttgtttagggtagggtggaattttaggtttaggttttaggaatgttagttttggttaaattgggttttttttgagtagtagtaaagtaggttttgtttttgaagaaatattggttatttaggagttagggttagggtttagggaagttggatagatggtgttaaggagtagggaagtatttttttgtatgttattttgagtttgtaggaaaaagttatgggaaaattttatttggtagataattttttataatttttaggatttatagagtgagtttagtagtatgtatgttatgggtatttttttgtttttatttttttgtgatattggattttggtataggtttttgatttgtgtagggtggggtgggtagttaggtagggttttggtgttggtagagtggggtttagttgtaaaggtttttttattttttatttatttaggatttgggggatgaggtttaaaggtttggtgtgtttttaaggagtttaaggattgttttagggttggagataggatgtatgggtttgtatagggattgtgttttttattttagggttgagagtaggagaattaaataggagagtgatataattatagtttattttgagttttagtgtttttagtgttatttgttgtaggaggtgatggggtaataaggtgtttttgaggttaggtgtggtggtttatgtttgtaattttaatattttgggaggttgaggtgggtggattatttgaggttaggagtttgagattagtttgattaaaatggagaaattttatttttattaaaaatataaaaatagttaggtgtggtggtgtatgtttgtaattttagttatttgggaggttgaggtagaatagtttgaatttaggaggtggaggttgtggtgagttgagattgtgttattgtattttattttgggtaataagagtgtaattttattttaaataaaaataaataaataaataaaaaataagattttttgggtgtaggtatggtatgtggtaggggtgattgttgttggtgtaattattattttttgggtgtgtgtttgtgggggttgtgtatgttgaaatgtgtggttattttgttggtgattaaggttgttttggttttattgttattaattatgtttattgattttatatggtttatttttgtgtttttatttagagttttttttagtgtttaagtttttggaaggttggaaggagtgagtagtgtagtttttggttaagaattgaagtataaaaattttagtttttttatttaattttaggtgggataaggttgggggtatggtttgtagtttttttatgttgtttggtatgggggttgggtagttatttgtggttataatgagttggtgaggtattttttattggttggattttttgtttggtttatttttatatttaggtattttttggtgtttttttttattgaaatttttgttttaggatttgtttttggagggatataaattagttttttagaattggtttgggttgtttggtggaggagggaggtggtttttggggtaggtggagtaggttttggatagggaggaggatatagttggggtgatggggaggggtgtgtttttaggaagtaaaattgtttaaaaggaaaggtttaaaaataggtgtagtgaagttgagtggagtttgtaaagggaagttaggaaatagtagtgttagtggagggtggtttttaggttttttatagagagttatatttgtttagggatagggataatgtgaatagaaggtaaagtttatattaaggtggaggaggtgttttttttttagagagttgtagttagatagtttaaatttgttaaaggtttgggagggaagaattagggtattattttatttttagtttaattttttttttagttttttttttttttgtttttttaaggttaggtttggttgggttatagtgttagtagttaagatttgtttttagtgttggtttagtttgtaggaggttagtttggtggttaaaggttattgattgtttaggtttatttgtatatgtggtttaatgattgaggtttgggatttggggttattatttatagtatttttggataaggaggaaaagaattatttttattaatttttggatggaggtgtagggagtgttaatagtatttttgaaaattttaaatgtattaggggggttagtatttagggaagagttataggaggttattttgatggattttgatgattatttttgtttaagtgttaggaggaggtttttttttttttgtttttggtaattttgggtttaagaagttttaggtattttggaggttttttttgtttattatagttttatttaagaggtttggtttattttgtaatgatgatgtgagaatgagtaggtttgtttagtgttagagtttgtggttggatttttggttgaggttaagagaaataaataagttttttttttttttttgtatgttataggaagagtagtttgttggttgtaaggggattttttattttgtttatggggtatagtagtttatagtattttttttagaaatggagtattggtaggtttgggtttttgtaagatggaatataaaggggtgggtagttgattttaatagttagtttttgggattttaaatttttttttattttttaattttgtgatgttaatttttttttggataaagttttttaataatttggtaagttagtattagttgaattagttttagtttgaattagtagttttttttagtttagttatagttttatttttttagaagggaaaagaagttttatggatttttttataaggaatttttagaatttgttatggtgtttgtaggggatattggtattaattttgggtttattaaatgtagtgggtttaatagtgttttttaaaatgatatgttttaagttttaatttttggaatttgtgaatatgattatatttggaaaatggatttttgtagatgtaattaaggtaagggttttaaggtgagattattttgaatttagtgggttttaaatttaatggtgagtatttttataaaagatagaaaaggagaaagatatatagatagggggagaaagttatgtggagataggggttagagattagagatgatggtgatgtgtttgtaggttaaggaatgttaggaatttttaggagttgttggaagttatgtttgtaagtttttaggttgtggtattttgttatagtaattttaggatatagattttaggaatagaatatagaaaagaaatgggaggaggtttagagtttgttgtggttattttagttattttatttgatttttttagtgttttgttaattttgaagttttttttagttattgagttattggttttgaaaaggagatatgggtgttttggagttggtttagtttggtaggaggtagttttgttttattgtttttttattagttattagtttatataggttttttatagtgggtaagtgtgttgttgttttagtttttgttggttttttttttgtttggttttattagttgtagagttttttgttgttgttttttttggtttaagaggtttatatatttagtttttttgggataaatttagtttatatttgttgttttattgtagttatttaagggttttttttattaatgtgttttttaagggatagtaagttatatggttgttttatttggggttagaattgtgttttattagagtaaggttttggagtaattatatttagggttagggagttatttgtttaagaatagaaatgtgtggttgggtgtggtggtttatgtttgtaattttagtattttgggaggtagaggtgggtagattatgaggttaggagattgagattattttggttaatatagtgaaattttgtttttattaaaaatataaaaaattagttgggtgtggtggtgggtgtttgtagttttagttatttgggaggttgaggtaggagaatggtgtgaatttgggaggtggagtttgtagtgagttgagattgtgttattgtattttagtttgggtgatagagtgagattttgttttaaaaaaaaaaaaaaaaagtgaaatgtgtagttttttttttttttatttttgaaatatgaaggggaggtgattgtaggttttttgggaaagatttttttattttttttttttttttttttttttaagatggagttttgttttgttgtttaggttgtggtgtagtggtgttatttttgtttattgtaagttttgttttttgggtttatgttatttttttgtttttgttttttgagtagttgggattatgggtgtttgtttgggatagttatgtagtagtttttgttttaagttatttttttttatgtagagtagaattaggattatagtaaaggttttagaggaggttattgtttatagggttttgggttttttttttgaaaggtagtttagtttttaagagggtaatagtgattgatttgggatgaaggtttttttgtgtttgtttttgttatttattgtgtgtttttggttttggtagttatagggttattttaggtggattttaaagtggtgttaagttgttggatttttttttttttttattaaattagttatgggaatgggagtatttttggtatatttttagatgtgttgtattggtttagtgttttttttatttttgggttttaaattagttgttggttgttttattaggagtagattgaggggaaatgggtggaagttgtaggggaagagatgtgaggtagataaagaggaagaattttttggttggggtggggttgttagggtttgggtgggagggttgtttattttttgtttttggtggaaggtagtagaagggtgggatggatttgtgtgggagggtttaggtgtggtttgtttgggggtaggagagggattagatgattttttaggtttttttgggttaaagattttttgataaatggttgttgttgaaggtaggagtgaggttttgggaggtgattgattttgaaaaattataggttgtagttttgagggttttaaaggttaagtatggagttttttaaaatgaggttttttttagttttaatttatttatgttttttaggtggttttagatattttgttagggtttttttggtagttttttgtttttgattttggagatagagaaatgtgatgttggtttttggtttgtttatagtttttttgtttttattatagggttgttagttatttttttagtttattgtgtgttttttttttttttttatttttgattttttaataatagtagatttttttttaaatatttttttgtttagattttgggttttatgtatgttgtttttagaaatgtattttagttttttgtgaggagttagtaaggttgtttggtgtttttttttatggatgggaagttttgttggggattaggatttggatttggagattttgaggagtgtgttggttagtgtttgttttgaggtttgggatagagttgttaggtataggtagtattggtgtgagggtttagttttttggataagtttttttttgtttgtttttagatttgttattgtatatataggtggtgattatttttgatttgtttgggtagagaagttatttttttttttttttttgttttattgtttattaggggaaatgttataagtatttaaaaaatgtaaaaaaaaaaaaaaaaaaaaaaaagtgtttaatattaggggttatttggtttaggtggagtttttattaattatggggttttttgtgttgtggttttaaggtgggtagttgatggtttttgtttgagttaatatgagttgtagtttaattataggggatggtgattttagggagtagagtttaggttttggttatagttgtatttaggagttagttgttttttagatttgtagagttaggggagaggtttggaggattggtattgaatgatatgatttaaagtgtgttaagttgggttggaggtgatggtagagttatagtggttatagagtttttatgtgaatttatatggatttgtttggtttaggttttgttgaattttagggtgaggaggatttggtttttatttttaaagatatgaagaggttgataaagaagagttataggtaaaagggggtggtgggtgtgttgtgtaggaggggttgtaattggatgtagaagattttagaaggggtaattagagagaggtagtatttttagaagatgggttgtttggttgttttaaatagtttagggtgtgattgaggggatttttggatttagttggggttttttttgttttgagataatgtattgggaaattttattaagtttatttaagaatttgaaaagttttttggaaatttagtgggtagggtgggtttttgggaggatttttggtatattgtgagagttagatatagtgagggggttttatatttttgtttagaagttttatggtagaggggtagaagtttagggaggagtaggtgttgagattagaggggtttataagagaggggtttggggtagggggtagttgttgagaagtttaggaaatggtgtttgtttttggggaagtgaagttttgggaatagggttggtgaaggggggtgggaagggggaggtgggggtggagggttaggttagattaggtattttttttagtagtagatttatgagtttttggaatttgtttatagaagtgataagtgttttgtttttagttttgtttatatatttatttattaagtgtggtagggatagttgttttttattatttattttgggatttggatttaagtggaggtttttggaggggtagatttaggggaaagggtttttttagaagtagttgttatttagaggatttgagatgagaattttattatgtttttattagatagaggagatttgtggtgtttttgagtttggttttttattttttatttagtagtgttttttttgtttattttaagtttagaatattttgttttttttaagattagttgttgtagtggattgaatagtgatttttaaaagatatgttagagttttagtttttggatttgtgaatgtgataggagttggaatagggtttttgtagatgtaataaaggattttaagaggagagtattttggatttagggtgggttttaaatgtaatgataagtatttttatgagatatagagatatagagaaaaggttatgtgaagatggagtagggagtggtgtgatgtatttatatgtttaggagtatttgggagttattagaagttgggagagaggtttgggttggagttttttgtagaggttttaaaggattagtttggttgatattttgattttggatttttggtttttagaattatttttagtttttaaagtttgtggggttttgttgtagtagttttagtaaattgttatgggggttttttttttttgttaagtttggtatttaaagttttttagttatttggggttaattatattgattttgggatttttaggttatttgtgtgttttatttttttgtttaatttttagtgtttgtgtggttatagttttttttttgtgatatgagttttttgggtttttgagtgtttatttgttttgtattgaaggttgaagttaaattttggagagaattgattttttttgtgggtagggtaggtattgtgtttttagtatagttagagggtattggttgaaatgtgtttttgtaaagtgttttttttatgtttgtattttttttttaagtggggaagttagagaggtttttttgattttttttttagttttttggggtaggaagtttgtggttatttgtttgtaaggattaggtggatagataattagttttttttaggttatattttattaatagagggttttttaattttgttggtggtttatgagagaaggaaaaattgaaggagttgtttatagtaaattttaaatttttgtgttagagaggtttatggttgagtaaggtatttttatttttattgttttgagttgttaatttagtttagtttagtattgtgatttttgatttgtttgtgggttatgggagtttggtttgttaattagtattttttagatatttattttgtgaagtttttagtggttgagtgtttttttgttttttttggatagtgtgggttataggggatattgggtaggaagatagttaagtttttattgtttagaaattgtttgggtttattgtagtaatagggatttatttattagtatgaggtttttttgtaggaggggtgggggtaggagggagtttgtggggtatagggttgtaggaggagttatttttttttttattaaattgtaggttttagttaagttatttttagtatggttgtttgtgtgggaagtttatagttgagggattgtttgtatgtggtatgtaggagttataagtgttatttatattttattttgggttaggtagatgatttttttggttttagttttttgatgaggaataggaagggttggattgaaagattttttttagtttggatatggaatgattttatgagggttatggtgaggtttgttttagttttgtatattagtttgggttagtagtttttaaaggtatagttgtaggggttttggagtagggataaggaggattagtttattttatttttttgggtagaggttaaggattttgtttttggtttatattttttgtggttaaaaatgtagaagtaagtagtgttggtagaggtatttagatttttgggtaaagtaggggttttatttgatattttaggtttggagtatgagaaaattagtttaggttttaggttttttgattgttagtgattagggaatgtgatattttttggtttttgtttttttattttttaattttagggggagattaggttgggtgatgtgtttttttttttgatagtaaatttttatttatttttatttttatttttgttttaagagggggttttttatggttgggtgtagtggtttatgtttgtaattttggaattttgggaggttgagatggatggattatttgaggataggagtttgagattagtttggttaatatggtgaaattttgtttttattaaaaaatatgtgagttggtaattttaagtttttagtagtttttgaatggaggttttttttttgtaggatttttaaattttataaatatgagtgtttgtaatttagttatttaggaggttgaggtatgagaattatttgaatttgggaggtagaggttgtagtgaattaagaatgtgttattgttattttagtttgggatatagtgaaattttgttaaaaaaaaaaaaaaaaaaaggtgggggtttttttatgttgtttaggttggttttaaatttttgggtttaaggaatttttttgttttagttttttagagtgttgggattatgggtatgagtttatgaattttaaaaaataatatttattgttttgtttttgattgtaaaaggaatttaggtataaagttgaaaatttgtaaaatgtataaaaataaagggaaaaaatttataaatttataatttaggtaatttttattaatattttgataaatgtttttttattttttattggggagtgtgtgtgtgtgtgtgtgtgtgtgtgtgtgtgtgtgtgtgtgtgtttaaataggtttatatagtgatgatgttgggtgtttttttttatgtggtgttatgtggttgaggtttttatatattttgggtttgtttttttgatttttttgtagttttgatgttttgattttagatatgttatttttggtttggattgtttaggagaattatttttggattttgttaaaaaatggattgttggtttttaatttttggtggttttggtttaggagggttgggtaagtttgggtattttggagtgtttttggggtgttgtaggtgtgaatttttgtttttttgaagatttataagttttattttttttatttttttttttttttttgagaattttataagaggaaagtttttatttggaggttgttagggatttggagttgttagtttatagttttattttgtttttatttttttgggagttatttaaggataatgtttagttttagttgttaagttttagttttagggttagttatatattgaaggatatgtagaagttgttgtgtgttgggtattgttgaggataaaggtttgaatgataagtgggaataaagttataaggttttaaaatttgtttgaggttttatagttagggttttggaaatttatgaaaaaagttagtttaatattttgttatggaatataggtaggagagggagtagtttttagttagtttttagttagttttttgttagtttttttgtgaattattttattttgggttatagttagggtagttgttgtttttttttttgtttgatagtttttgagggtaggagttagtttgtttattattgttttttttttattagggtttggtattttgtttggtatgtagtagaagtttaagaagggtttattgtgtttattttgtaatagttaatgtgtatgagtgtttattatatttgaagatagtgatttatttttgtttttattgtatagatgggaaattgaggtattgagaggttgatgatttttttatattgttgtgtgggtaagggtaaggttagatgtgagttggtatgttgggttattgtgttttttgtttatattttgttttgggtttgggaaggttatttttggagatttttatgatgttgatattttgtttagtttttttgtgtatttttttttatgttttttagttatttaaagtattagttaggtagtattgttattttggttttgtaaatttagttattgagtggaagagtagttaggttgaagtggggtagaggtagtttttgttagattttagggttgggatttttagttatttttattttttaaggattagtagatagagatttttattgtgtttagttaggggttagggaataggtttttatagtgggggagtgatggatggatgtaggtgtggattgggaggatttgggttggttttttagtgttggagttttagtagtttaatttattttgttgggtttttgtggggattaaaagatattttgtatataaagtattagtttagggtttggtatttaggaggtgtttaattaaaggaaatggttatgaaaaataataaggagaagtttagttataggaggtgtttgtgggtaaggagagaatagttggaagggtttggatttgggttagagataaagaatgtaagagggagggagggagagaaggagggagggagagaaagagggagggaaagaaagagggagggagagagggagggtagggtaggtaatagttggttttagggtagttgtgtgtaggagtttgttttattatttaaatattaggagagatgtaaatatttgagtgaggtttttttagtttggttttgttgtggttatagttagggttggagaaagagttttttttttattagggtttttgttttgtgttttttattttagttgttttaagattttatgtttttgggttaggagtaggggtttgagagtagtaattaggtagggtagtggggttagggagggattttgtttttgtttttattttttttttttgtttttgtttttatttttttttttttgtatagtattgggtttgtaaaggtgtgaatgaaggatttttttttttatttgattttaaggggtttaggtggttaagggttttttttgtagtttagaaaaaaaagtaaagtagttttttttgaggttttttggtggaggtttagggtttaaagtttgttgttataaatttgtagttttttttgtttttttaatagtgttttttttttatttgggttattttattattttggttttttttagttttttaggttttttggggaggaggatagatgtagagtttggattttgtgtgtagtagggtttttttaatgttgtggtgtattttgtttggttgtgggagtttgttttatgttatgatttgtgttggtattaatagtttttttttttattttttatttgagtgttgagggtagttgtgttaggtatagatatatagttttttatatatattatgagtttgtagaaatggtaagagaaggttgagtgtagtggtttatatttgtaattttagtattttgggaagttaaggtgggtggattatttgaggtaaggagtttgagattagtttggttaataggatgaaattttgtttttattaaaaatataaaaaattagttgggtgtggtggtgtgtgtttggagttttagttatttaggaggttgaggtaggagaattgtttgaatttaggaggtggaggatgtagtgagttgagattatgttattgtattgtagtttgggtaataagagtgaaattttgttttaaaaaaaaagaaagaaagaaaaagaaaaaaagaaaaggaaaatggtaagagaagttggttagtattatttgtttggtaaatttttattttggtttttggttaggaagtttttttttaggaagtttttttgttttatttttttttttgagtttatgtttagatttttagtgtttagaatagagttggtttttggggtatttatggatggttgttggataaataaataagttaattgttttttttatttttagtgatgtttttggtttggtagggtatttagtagtaatgttttttgagtggattttaaggagtattttttattgtgtagtttgtattagggattttagttttttattttaaattaaaggaaaaaatttaattttagtaaatatatagagtattttattttttgatttttaatggggggtaagaggtagaggatagaggagaagattatttttttaggtttggtttggagttaaaaagatttgtatgtttttattgtagataatattggtttttgggggatatagggtaggggtttggtttgttttttgtagggaaattgtttatttatgtggaaagtggggttaagggtttttgtttggaattagttttttgtatatggggtggggggtggggatagaaggagattttgtttggattgtatggaaatttattagattgttggttgttgatttggtaggagtagagttatttttattttttagggttttgtttgggggaggggagaggttaggtggttttgtttaggttatattttttatggttaggaatgttttttttttattagaaagaaagatgagataggtttattttgaattttttggatataggaagggggtttatttgtggtttaggtggtttttttttttatatttaaggggttttataaggaggtgttaggatttttaggttttgttttagggaattgttgtttgtaaaggttataggtagagatagttaggaatgttttttatgttattggttatgggttggaggttgtgaaattaggtatagaattagaaagatttgttataggttgtaaagggttttagagagttttagttttttagaggggtagtattgtagaaggggtgagaaggaaaaattagtttttaggaattgtttatttagagtttatataatatttaggtggtatgagataatggtttattttttattttatttttttgttgttttttaagatttgagtttttgggggtgtttttagtagatagggggatgtggggtaattgtttttttttaattgtatatttggaggtaatttatatttagatgatttttttgaggttgtgattagagtttggggtaggggaggggaagtgggtggatgggaaggtgagggagatttttttaggaaagttgttttaggtgtttgtaaggttttattgtttatatttaaggtataggtttttggttttgaggatataggaaatttgatgttatgtggggaggagggtattgtaatgtatttaaggttaggttttttgattttttggatattggataaatgatggtttttttagttggtttagagatgttaggagtgatagaatgttaaaggttgtagggggatatttagaaatttttgagaaagaagatggataaggaaaaataaaaaaatatgagaagtttagtagagtttgagttttgtatttttggttttttttatggttatgggtaattttttggagatttagttatgggagtagtggaggtaggtatgggtgggggggggggtgggttttattgtttatggttttggttgatattgaggttatttttttgtttttttaagtttttgggtattggtaggatttttaaaaatgataataaatttgaagtttttagaattgtttgttggtttagtttaaatggagttttggggttttgtagattaaattaaatagtttgagtttagaaatgttttaggtgtttgggggtgtttaggggttaattggtgggtttgtttggttggagagatgataaatttttttatttttgggattgtgttttagagagttttggattttttggttttataagtaatttagagtttttaaatttgggaaaaattaagagggttttggaaagaaaggtagtgtttgattatttttttttagtggttttgttaagggagagtataggaatttggtttttggttgggtttttgggatgaattaaaataaaaagaaaaagttgggggagggggtggtggaattgtttggggttttagtttaggttatatattaaggagattttagaggagtaggttagttttatttttggtatgatgatggatgggtatttggttggttggtaaagggaagagatggtaatagtgaggttttgaatttagtggttaagatttatttttgagtgtgattttttttgatgtttgggtatgtaagaaatgggaggtggagaaaggaggaggagattttagttttgtttttttggtattaggttattagggaatagtattttttttttaatgggtaggtagaggttataggttgttaggttgagaagtttttggtttttatagataaatgtatagtttgtatatttgtattattttgggtgatgtttattatgtatggttattatgtatgttttttattattaagatagttgatgagattaggtggttattgtgtattgggtattgtggtgattgtttgatattgatttttgggggtttaggtttttggtgggtttgtttttttaggtatttagttttttttttattttttgatattttgggtttagtgtaggggtatgggggtgtttagtggatgggtttatgggttgggtaagtagtatgtagttttggtttattagtttttggttttattattagataagatgagattgttttagttgttagtttagttttgtattatatttgattgggtttttgtagaggtttgttggatgagaatgtttagggtagtaggtattattttttgggatgtatattttgttataattgttttttagggaaaggttagtttgtagagttgaatgtaggttgttagtgtttttgttgtttttatggtttggttatttagtaagtgtttattttattgttagtgtttggttttgtagatgggtatatggtttatttatttgtgatattttagggtgggggtgggggtagatggtggtagggaagattaggataattttttagtaagaggaatttgtagttaatatgatgttagtttttagaatgttagttaggtaggaaaaggggggttttatggttgtattgggagtttgagtatttgttgggtttagagggatttttaggtgggtgttattggtattagtgtttgttgtgttttttataattagtggtgattatgttgtttggttttatttatatagtggtattatataggtttttgtttgagattttttatttttagatttgtatatttaagtatttaaatttatttgttttttgtaaatgttttttttttttgtttagatgttatattagttgtgatatttattatatttgtaggaggtaggatttgtgtttagtgttatgggttgtattttagagttttttagtaatttttaaagagagttgtttttaattttattttgtaggtagggaaataggtgaagaaattgaagaaattgaagttgtttagttttttaatggtagagtgagggtggtttgggtatttttatattgttatattttttatttttttaaagtattgtttttttggatgtaaattttgtttattagttttatttaaaatttttttggatagttatagtttatagaaagtatttttagtttgtagttatttagttattgtaggggtgttttggtgtttatttttatttgtttttttttggatatttagtttagagaatttatagttttgttgtaaggttgattatagtgtatttgttgtttgggtgttgtgtttgtttttttttaaatgaattaatttgtagttgggatagtgggtttgtttggttttgggttttgaatttaaagagtattaagttagtgttgttagtggttgtgggatttgtgtaagaggtttgtttttattttttatggtttttgttttttattataaaagtttaaattgtagagaggtagtatttataggatgttttgagttttggttgaaaggtagggtttattatgtaagaggtttattggtattaattagggataggtttgtatttattattaagtaatggggtttttttttttagagaggaaagaggtatttgaattttgttagtgtgttagtttttatgttttggaggtgttgggatttttagataagaaggtatatttatatggttttttttatttagaagtttgttttatagtttgttttgtttttagaatatagatttgggggttttttttgggtgatagtgggggtttgggagaagtttagatgttatatagttttgggatttgagtatgtgggttttgggttagattgttttaataaatattaaggatttttggatttttttttggtgtgtaaatttggttatagtaaatattgttgagtaaagtaggttaatagttggtatttggaaaggtttttgttatataaagatttgagttgtaattgtgtttgtgataatagatttggtttgaatttatgaaagtatatgttgtttgttagttttgtgtttttattaattagaagggagaaagaggaaagggttattttttttgttattttattatgggtagtggtgggtgttgtagttgtttggaggtttgtttgtatagtggaaaagtagaaaatgagattttaaaaattttattagttaaatataaaatattttttttgttgttatgtggtggtttttatagagttttaaaattttgaagtttggagatttattttgaagggggagtaaaggtgggatgtgggaagtttgagtttatggaagatattgatattttttttatttttgggaattttgagtttgaaggatttggtttgaatagtggaaggattgaatttttgtgtaatttattggtgatggaatataaagttatggtgtttttggtttttaagatgggagggatggggaaggttttgggtgaaggggataggtggggaaggaaaaggtgaagagaaaggtgttttttagggagggggtagatgtgtttaggatatgggatattggtagaattttaattttgagtatatatataggtttatggatggttttttgtttatttgttttttatgggtgtgttgtgttggtttgggtatttgtttttttttttatgttaggttatttgttgtttattttgtatattgttattagttttaagttttttagaatattttgattagggttttgtggtttttgttataggattttaggtttagatgtttgtttgattggaaaattgtttttagagatgttgtggtttagagtttgttttgttttggggtggtttttggagtttttgttttttagtaatttatatggtgataggtatttatatttgttggttttaggaattttggggttattattttagtgttgtaaggagttggtagttttttttttatttttttggtttattttgtaggaattaagatattaggtgagttgttttgggaaagagatttgtgtttttatggtgttgtttttgtgtttatttttagttattttagatgttttttgtggattagttgtatttttggtgggtatgtttggttttttgtagtttggtttatatgatttttataggtaggtttttttttatgttttagttttttttttagttagtttattttagttttttttattgttgttggttgttgttggttagaaggttttttttttttttgtaatttaatttttatttttttttaaggtttgttttttttatattgattttttttttgttagttagtggtgatttttttttattttgatttggaagttgtttgtttatattatttttggttgggttgaattatatttttttttttattttttttaattattttttttttatgtttgtttgtttatttaaggttgtttaatttttatatatatatttttatattttttaattatattttaggttttttgggtattagggagggttatttttttatattttaggttagtttttatgtatatgtgtatttatgtatatatatatttttttatgtttattgatttgggttatttgatggttttaagattagaatttttagtaaaattatttaggatatataagggggagattgataaatatagggaattagtagattgaggttttattttttgagattgagaaatttttttttagagttaaaggattgttaattgttgtattaggatggttttaatgagtttattgttttggattaaattatagggttataaaattggtttgggagatagttgtagaagtagttttagatggaggtatatgggggtaagggtggagttatatttagagatttaaggaaggggtattaataatttttatagtgtaaatggtgatagttgtataatgaatataattttaaattttggtttttttttttgttatagggtttttgttgagatatgagagtttttttttagaaattttattgggggtttgatattttttgttaggaattgagagtagagattttgattttgtaggtaggaggagagttttgtataatatagggtttttttttataagggtttattggaaagtggttagattggttaagttgtgttatttggatatttgggataaggaaggtttttggaggagtggttgtagggaggagttgtaaagaggtaggggtagggaggttatatttatttggggattgtaggaggtttaatggaatatagtggatttagggagattttagtatgagtatgtgtttaaagatgtttagatgaggaggtgttgtgggggaggggggtgggaatagtaagtttttttagttttgtagatttagattttttttttttttgggaagtagggatgtaaagggatagagtttgaaaaagggtttttattattaagttgataaagtaattatgatgtttttagtttatattttgtatagtgttagtggttattggattataatttttttttgtttttttgttgttttatattttttttaggtttagttttgaagaatagttattggtattttgtttggtgtttagttaaagttttggttttttaggaggttttgttttttttatttagatagggttgattttaggtgggttgtgtgggtagttgggtttaggatatttagatgttagttttggttttggttatggagtggggaggattttaggttggttattttttagtttggtttgatatttggatagtttgtttattttaatatagttttttttttttttggtttattagagggttttgtttaagttagtttaggagtttttttgaggggtgggggttttaggttttggtagaggtaggtttgttttttagaagttttgttttagagtgttggagattattgtgtgagttttttttttgtttgttgtatttatttttgtggatgtaggatgtagagttttagtattggtagttaagaggatgtaggaaagtgtatgtatttataggtttagagatgtggatgttagatttaggtttggatagagtagttttgtaagttttaatatattttgtaaattttgaagataggagagagttaaaatattttttttgtttgtatgtaggttttttttgttttttatggtttgattttgggaggtggatgaggatatttttaggtttggatgggggttatgggatattttattttagattttgttatgatttgggttgtgtttgtttggtgtttttggtttatgggttgtataatttggtggttttgaaattggtgtgggggaggggagggttgtttatttgagtaggatgtggttgtttatttagttggaggtgaggaatgatttttttattttgttgttgggtttaagtggggtttgagagttgttggggagagttaaagggaggggattgatggattttttagagtgaaattgtgtgttttggagagttttgaggtagttttgtgagtttttgaggaggttgttgttgtttggtaaatataaataataataaaaggaaggaaatttaggtggtagtgtgtagaatgagtatagggttttgtgagggtgtgtagggtttatgtgggtgtttttaatagggttttttatgtaggtggtgtgggtatggggttgggggtgtgtggtgtttttagtgggagggtgtttggattaggggttttgtttttttttagtgtatttttgtttttttttagtgtatttttgttttgtgttaggtttatttgtagggttttttttagtatgtttgtggttgtagtagttagtttagtatttatttttgaagtttgaaatgattttatttagttgtgtgttgattgtggggtttgatatgatggttggtgggtagtgggttgtgtggagggtagtggtgaggaagtgtttttggtggggtttgggttttgtgtgttggttggggtgttgtgtttgtgtttttgtagtgtagagttagttgttggaggagtttttaggttttttggtttagttgaatgaatgggggaggaaggtgggtgttggtttttttttgtgtgttgtgtttttgttttgtttttgttttttgggtggattaggtttttgtatttgtattggtttttttgttttgtattggttgttttgtttgtttgttaaggttaggtttggggggttggggtttgagtggttgttgggggatagttttgggtatatgattggagtgttttttttttttttgtttggtttgtgtttaggggatggtgagagatgtggttttagtttttttttttgggtgttttgttgtggttagatgtgggtggatgtggaggttgggttatggtgaggagggtgggtgtttagaggggaagagatttttttttttttttgggtgtagggtttttttgtaggaggttgtatttgggtagttaaataaagttttttgttattgttgttgtgtgttttgtgtttgtaagggttaaatggtagtgtatgtggttggtaggtaggattttggtttgtgggtttaagagttgaggggtgtagggtgaatatgtgagttttatggtattagtgagaggttattaatttttatttattgagggtatttttgtagttaatatttttattatgattattgttttgggggttattgttgtatttttttgggtgagttttggagaaggtattgtttgggagaaggggtatagggtggggatggaatatggttgttagagaagttagggatgggtgatgtttttttttttttataataagggttttttgagagtaggaagtagattttgttaggagtagatgtttttgaaggaaggtgtgaaggaaggagttaggtagtgagtgagtagaaagggagttgttttaagggttttttttttttttttgggttttaatttgaggtttagttttttttttaggttagtggtttttatttttaaattatattatttataaggtaggtagggttgaggggttggggtagatttggggatttgggttagatatagaatttgagaagtaataggtttttatttttaagaagggttttttaggtttgttatttataagagagagaggtgttttttttatttgttttggaaagttagaaatttatttttgtatgttttttttgttattttgttttttagatttttggtttttgtttagagttaggggttatgtgagaatttatagtatggaataatatttttatttttgaagtagtaggttgtaatgttataattgtattttggttttttgaatgtgtggttggggagtgtttgatagtttattttgggtttgaggttgtttgttgtttatttgtttttttttattttttttgaaatattttaaatgtgtaggagtgttgagattttttagttattttggagaggtggggggtagggggttttttgtggaaaatgttttaggtttgggtggttttttaagtagatgaaattaagttttttttttttaagaaaagtaggtatttttttttttatgttttggatattttgaattatttttaattaagtgagtttgtggatatgggaattgtaaaattatagatattttagatgtgtgtatatttttgttggtttgggagtttgggttttagaaatgtagttattgttgttattaatagtattttgtattttttatgttaggttagggtatgttttgtttgaattttagtatttgggtttattggatagtttagtttttattgggttatttgtttatgttgtatttggggatttgggggtttagtatttaagaaatttagtttaataatatagtttttttgggaagatgttgggtttggtataatagttattttaagttatagtattatttttgagtgtttttttaaaaagtatttggtgagtgtggatatatttatgtaattgtttttttttagggttggtatggagttttattagattagtatagggttagttaattgtatattttttatttttatgtatagtgtagtaaatatatttagttttttggggagtgttgttagggtgtatgttttattaaaatgggaatttaagggataatggtaggagagtagttagaaagtgtgtatgtttttgtgattgtgtttagagtttattggttttagttttagttattgtttttttaatgtaattatttagagttatatgattaggtttagaaatttttaggtaaggaggttttttgagtttttttaggaaatttaaattagggtttggttatatttttagttaggaagtttatttttgtatttaattaattgttttaattgtatattatttattttttttttttttttgtttttagaggagatgggaaatagttgggtattattttttaagttataattattttttttatatttaaggataatttagttgttttttggtttttttttttttagtttaaattatttttttttagttttttaattatattttgagttgttttttgattatagttaagggttgggtttagtttggggttttaggattttaatgaggttttattgttataggatagtgaggaggttttttattttttttttttagggttttagggtttggatatatagttttagaaggggtattgggtagagaagatgtatgttggtagtagagaggaaattgagttgaaatttggtaagaataaaagaattataaaggtttgtgtatttagtaaggtgtatttttttatggttataaaagaaggtaagattgattgtaggtttggttaaagggattgtttgtgtttttagtgtataatgagatttatagtgggttggtgattttttttaaaataaagatatgtttatttggaattttaaatgtgatttgattttgtttaagggtttttgtagaaagaatttaggtaaggattttaagataaggtgggttttaaatttaatgttgtgtttttttaagagatagaaaagaaagtatagagatatagaaaaaggttttgtgaagatagaggtagagattggagtgatgtagttataggttaaggaatatttggggttattagaagttggaagaggtaaagaaaggtttttttttggagtttttagaggaagttggttttgttggtattttgattttagatttttggtttttagaattgtgagaggatatattttttttgttataagttatttagttttgatagttgttatagtagttaggagaaatttgtgttttatttttatttgtattatgttttgaggttaaagttttatatagtaaagatgtttaagtaattataaattttgtgggtagtttatttgtttagtagattattgttttaagggaagggggatggggatagggaagagagttataggaaatttttgtatgtttttttggaaatgggaaggagtaggtttggagagaaattttataggttaggttttggggaaatgaagtttataaagtgtgggaatggagtggggaggaaatttatgaggaagtagtgtttggtgtatatatttatatttatgatttttttttaggtatagtttttatggagaggtttagttggtagggaagtaaaagaggtttggagagtgaaggaaggtgaggggtttttttttagtaatattgaggttttagatgggatattttattaggtggtaggttgtgtttttatagatagagattttttaagggtagggtttagatggttttatttttgtgtggtttgatataaagtaggttttttagagttgttgagttttgggtttgttagtggtagagttttttatagttttttaagtttttatagttttttattttaggaaatggtgttattatttatttagttgtttaagttaagtttttgggtattattgttgattttttttttttttttatttttagtatttaaattatggtgtgtttttatttttagtttttttgtgaattagtttgaattttttttttttagtagtgtgttagttaatggttaataattggttatttggggttagtaaaagtaataatatttagttttttgatttgtagtgtttgtttatttttgtggtgttaatatttttgttttggttaattttttttttttttttttttttttgatagggttttattttgttatttggtttggagtgtagtggggtaattttggtttattgtaaattttattttttaggtttaagtgatttttttgttttagttttttaagtagtttggattataggtatttgttattatttttggttaatttttgtatttttattagagatgaggatttattttgttggttaggttggttttgaatttagatgatttgtttgttttggttttttaaagtgttgggattataggtatgagttattgtgtttagttggttaattttaagttatttgtatgatattattggaggtgagattgagaagagatgtttagttattatgaatatagtgtttttattatataaatataattttaagaatataattgtaataggatagataatagttaaatgttgtaaaaaatttaagaggtgatgaaagttgtgtatttattattttttgttttaaatataattatttataagtaattttttaatgttttgtttaattttttttttataatttgtaatttaatttatattgtaaaaatttattatttttttaatagagtaatgtatttttattgtgataaaatatatgtaatataaaatttattatttttggttagttattatggtttatgtttgtaattttagtattttggaaggttaaggtgggtggattatttgaggttaggagtttaagattagtttggttaatatggtgaaattttgtttttattaaaaatataaaaattagttgggtgtggtggtaaatgtttataattttagttttttgggaggttgaggtatgagaattgtttgaatttgggaggtggaggttatagtgagttaagattatgttagtgtattttagtttgggtgatagagtgagattttgttttaaaaaaaaaaaaaataaaaataaaaaagataaatttattattttaattaagtttttatgttagtgatattaagtatatttatattgtatatttattaatattatttatttttgaaattttttttaattttttaaattgaaattttgtttttattaaataataattttttattttttttttttttagttgttggtaattgttattttaatttttttatgaatttgattttatataagtgaaattatataatatttgtttttgtgagataggtttatgtagtatgaggtttttaaggtttattatttaaggtttatatgtagtgatagaattttgttttttttgaaggttgaatgatattttattgtgtgtatatatattttgtatatttattttttttatatttgagtaattgagagtaaagttgttataaatatgggtgtgtaaatatttgtttaagtttttgtttttattattttattattattattttatttattattagtattattattattttagatagttttattttgttgtttgggttgtagtgtagtggtgtgattttggtttattgtaatttttgttttttagattggagtaatttttttgttttagttttttgagtagttgggattataggtatttgttattatgtttggttaatttttgtttttttagtagagatggggttttattgtgttggttagggtagttttgaatttttggttttaagtgatttattttttttagttttttaaagtgttgggattatagatgtgagttattgtgtttagttattattttagttttaaatattatagtaatttttttattgttttatgagattttttgagatagtggttttagggattttatatatatttgtttgattttgtgtaatgataaagtgtagttttttttgtagaatggtagagttgggagatttttgatggggtatgagtttaaaggggtagaggggatgtttagaatatatatggattttttatgtgtgttttgttagttattaagtagatttgttttagttttgatatgtttaggattatagatagtgtatggtttttatttgggttaagtttttggaattttttttttttttatattatttgtattgggagtagttattaggttgtggattattaagttttttttaggttatttgagtttgtatttttttatttagtttgattgagttggtgtgtagttattatattttattatattttttgtttggttgttttaatgtaattataaggttttatttaaagaagtatatgattaatttgttttttagattttttagtgatttttttagtttgttttgtgtagaatatttatagtaaaatttgattatagtggtttgagtttttatttttaaggtaggggattttttaaataaagtattagtgttttaaatttatgattttttaaggaggtttttggtttttagtatagtaaatgttttgttttatggttttttggttttttatttttattttatttgagttttttgttttggtatttgggattgaattagtttggagttttttagttttgttgtttgttggttttgatgatattattagggattgtagtattgtttggattttttgttgttatattttattgtaataatatttaatttgatggaattttgggagtaagtggtaggggtagggatggtggtggttaggggttgtatatatataggatagaaggattgaaggattgggtggaaagtatgatttttttaagatgatttttttttagtagaattttggttgtgttttttgaatagtatttgtttatttgtatatttggtgagttttgtgattagtaaatttagatgtttgggaggttattagtggttttgttgaggtataatttagatatgatagtttatgttttttttttgatttttttttttttatatagttttatgattagagtgttttttttatttttgtttttattttagttttgtaagatatagttgtgaaatggttaaagtttttaattttttagtatttgtttgagattggagtataaaaatgagatggggatatagtattttatggatattagtgatggaaaaaaattttttgatttttttgggagttttgtaaagttatattaggggataagaaggagtggttagtttggtattgatttagttttaaagtagttagtgattaaagtatatagttggtatttttttatttttagggtattaggaggtttggttagaatttatgttagttaggagaaataggttgtttttggggtttttggtgttttggtttttttattgtttttttgaagaaggtattttgttttgtggggtttgaggttggaggtaatttgttattgatgtagtgtagggatgagggttgagttattagtttgttttagttttatgttagtaggaataatagggatttaagtagagaagaaagtatttatttttaaagttattatagtgattgaggtgatgtggtttttagggagtttttttttttgttggttttttgtggattgtggttttatgttttaataatgtttttgtttattttgtaaggtttagtaggtggaaggaaagagggtggaggttgggagtggtggtttggtaatttgggaagggtagggagtaggaatatgtttttttttttttgtatttgtttagaaggttttatagggtttgttttgttatttataattttagggagatttttttttaatgtttgttttataaatgtttatttattttatatttgaatatttttagttatagggagtttagtatttatttatgttatttattttatttttggttgtttaaaaaagaggaaagagagagaaagaaaagataggaaagatagagaaagggggaaagagagagagaggaaagaaagaaagaggaaagaataagataggaaggaaagaaaaaggaagggaatggaagggaaggaagagagggaagaaagagagaaagagagagaaagaggtataaataaggtaggttttatggagtagagatttaataagggagtaaaatatatttgtagttaggttgtagatggatttttataggagtgtatatttattttattttttttggaatagaaaagtggaaagaagatgtagtggtgtgggtgggtggtggttttttttgggggtttggaatgtggggtattagtttttttggttttgagaaggagattaagattattaatatttatagtggagattgaattatataagggttggggatattgttttttttgtatttttaataaagatttgatgttttaattatgggaatttgtggaagaagaaataaaattggttttggggttttttagagaattggttttttatttagtggtggttgtgaagaaatttttggagttagttttagtggtttgggtttgtatagttgagattgtttttggaagttgagtggaagtggggagtttttaggtatagttgggttttgttttttattttagttagtagttttaggatttttgggtgttttagagttttttttagagggtaaatttagagtatgagggagtggggagatgtttaatattgggggatttttgtttgtttttgtttttagttttgttgatttgaatagggaggttatgggtgtttaggggtagaattgtgggttggtaagtttttagttttggtttttttttgtttttttttttttattgttattgattatttttggttatatgttgatatttttataggatgatggagaagagagaagaggaatttttttgttttgtttagtatattttaaagaggttttagtgtaaaggtattgatgtttatagttaaatgtgtgtgggggttttttaggagtgggatgtttttattttgttttagattgttatgaattgatagaaggttttatgttattaaatatattttattaataaattattttaatatttagtaaaaaaataaataaaaatgtatgtattttgtgttttgtagtgtttttatgttgtatttttttttgtatttgagttttggtttgtgtttttggtttgttgttttgggaatagaatgttttgtgtgggaggtagataggaagtgtggggtgtgttggttgggtttttttagataatttggtattgttttttttagataatgaaattttttttattttgagtgtttttggaagttagttggtagttagattaatttaaatgaattatttgttttttttgtgaagtgattttagggatttaatgggtttgttattaatatagttttttttgtattttgttttttttttttatttttttttttttgtatgagttattggttatgatgatttggtttagttaagggatttggttagttttggttaggttatgtgagagatagtataaaggattaaggttgttggaattaggttagaggttgagggttatatggattttttggagtgtttgtaattggggatttttaaggttgttttttggttttggggatttgtttatttggggatagttttaagggagatttttaaaagtagggagttaaaagggtgaattaatatagaaatattgagggttagggagaatttgaagatgggtttggttgggtatagtggtttatgtttgtaattttagtattttgggaggttaaggtgggtggattatttgaggttaggaatttgagattagtttggttaatatggtgaaatattatttttattaaaaatataaaaattagttgggtgtggtggtaggtgtttgtaattttagttatttaggaggttgaggtaggaggattgtttgaatgtaggaggtagaggtggtagtgagttaagattatattattgtattttagtttgggtaatagagtgagattttattttaaaaaaaaaaaaaaaaaaaaaaaaaagataggtttaaggtttggagagttagaagttatttttttatttttgggtggtttattttgagattgtattatgttagagaaagttgtgggagtgtttgtttataatttataagtaatattgttttttttttttattagtttttggttttagtaggtttttgatttgtgttttttttagggttttgggtttttttaagttggatttttggttgttggtgggatgattatgtgatttgttatttttttgtttattgttttgggtagtttttgttatttggtgtatatagagtggagtttagtaaggttggggttgttgattttttgttagttatatttgtttttttttatgttatttttttttgttttggttatgtttaggggtttatatttttttataagttaggtgttagatttttgtgtttgttttattttgttttttttgtttggtgggttttttatattttttttggtttgatttaggtttgatttgtttttaggttttagtttagaggttgttttttttaggaagtttttttgggattgttagatgaagggatttttttttggattttttttttatttttatagttttaggaatagtttttaatttaggttttattgagttagtgtggtatttaggagagttataagtgtgtgatgaatgtgttgaagtttttttaaaagttgaaggagttttgtgaatatatagtagtattagtttagattgtgaaggtataggggagttagttttttttagttttgtttgtttttggttttttttttgaggaggtgggagttagttagttgggattaggaggtgggttttatggagtagagatttaataagggaataaaataaattagagaatttttttgttgtaaggaatttagataaggagtatttagttagaggaggaaggaagagattggtagtagattttttttgttttagtagttttgtaagttagatgggttaattttttagtatagttgttttttagtatagagaaattttttatttttagtaatagggtgggaatatttttagatagggttatggttattttggttatagggattatggagtttgagtttttgtggtttgttttatttatgtggttatagattttgagtatatatttggagttatagagtttaaagggtagggtagggtagggaatttgtttgattggtgaaggttattttattatttggagtataggtttttgtttttaaatttatatggagtttttgatatggggtattgattttaaggaggtgaatgtggatatttaaggttagtgaatggttaggtgttaatatattgataggtttttggttttttttttaatattgagggtaggaaataaatggggtttatatggtgtatatggtttttagagttagtaaggtgtgtaagatttggtagttgagaaaattgattatttggttgggtgtggtggtttatgtttgtaattttagtattttgggaggttgaggtgggtggattatgaggttaagagattgagattattttggttaatatggtgaaattttgtttttattaaaaatataaaaaattagttggatgtggtggtaggtgtttgtagttttagttattttggaggttgaggtgggagaatggtgtgaatttgggaggtggagtttgtagtgagttgagatagtgttattgtattttagtttgggtgaaagagtgagattttattttaaaaaaaaaaagaaaagaaaagaaaagaaaattgattatttgattatgaataagttagaatatttatttagaaaaaaaaaatagttttgtttaattggggatttaaaattttaggatttatgttttttttttatagagttatattatttttttaatgtttatttttgattttatttgtttgttaagttttaggtatttagaatatagtatgatagtaagttttgtgatttttataggtttttttaatttattttaggtatagttatatttttagttttgagtagtagggagtgatatgtagatggttatttagatagagaaagatttttaaaaggagggtaggttttgttttgtaggtagtatttattgatatagatattagtaggtaaattttttaggaagatttttattaagaaagaatgaaagaggtttagtgtggtggtttatgtttgtaattttagtattttgggaggttaaggtgggtggattattttaggtaaggagtttgatattagtttggttaatgtggtgaaattttatttttattaaaaatataaaatttagttggatgtggtggtgggtatttgtaattttagttatttgggaggttgaggtaggagaattatttgattttaggaggtagaggttgtagtgagttaggattatattattgtattttagtttggggggtaatagagagagattttgttttaaaaaaaaaaaaaaaaaaaaaaaggatgaaagataaataaggttgaaattggtaggttggtatatttttaataatttattttaggttgggtgtagtggtataatgttagtattttgggaggttgaggagggtagattgtgaggttaggagattgagattattttggttaatatggtgaaattttgtttttattaaaaatataaaaaattagttgggtgtggtggtgggtgtttgtagttttagttattttggaagtttaggtaggagaatggtgtgaattagggaggtggagtttgtagtgagtggagattgtattattttatgttagtttgggtgatagagtgagattttgttttaaaaaaaaaaagaaataaaaaataaaaataataaaaaaaaaataatttattttagtagggagtaggaggtaaggtttgatatgtagtgtttgttaatttttgtggtgtaaatatatttattgtggtaaattttaagttataaataggatattattaaatatagagttgggaaaagatatgtatattattggataaaatgtttaggtagttatggtttatttttttttgggaaggggggtatgtttagaatgttttttattatggagaatgattgtggtaaatagggtttaattggtaggttgatttaattaattgtttattgatgtgatgtggggtaggtttttgaggttgtttttatgtttagggaagaaggtggttatgtggttatagatttggttttgggtttgttttttttttttttttttgagatagagttttgttttttttttttaggttggagtgtaatggtgtgattttggtttattgtaatttttgttttttgggtttaagtaatttttttgttttagttttttaagtagttgggattataggtgtttattattatgtttagttaattttgtatttgtagtatagatggggttgttggttaggttagttttaaatttttgattttaggtgatttatttattttggttttttaaagtgttaggattataggtatgagttattgtgtttatttgggtttgttattttgaggatatatttggagttatgtgtttatgattttttttttattttaaaattttgattttattttattgtttttagagataggttttgttttgttatttaggttggagtgtagtggtgtaattatagtttattgtagttttgaatttttaggtttaagtgatttttttattttagttttttgagtagttggggttgggtttataggtgttattatatttagttatattttatatttttttgtagagatagggttttgtaatttgtttaaattggttttaaatttttggttttaagtaatttttttatttttagttttataaagtgttgggattatagatgttagttagtgtatttagtagttattatgattgattggtgatgtttgttttagttttaggatgaaagagtagtagtattttagttaagtatttgtggtttttgattggaagatgttttttttgttttttaagtatagtgtaaatgttatttttttggtaagtttttttttaattttattttttttttggtatagggtttgttatagttttgtttatataaagagagttattagtgtatgtggtatagatgttagttgtttttttaatatttgagtttttttttttttatagtaattgaagttttggttgtgtatagggaagtttagttgaagaatatattgtttagtttttttgatgataggagtggttatataattgggttttggttagtgggaaggagttgaagtgtttaatttttaggttatgtttttaaaaataaagagggatatttgttttttttttttttttttttttttttttttttggttggagtgtagatatgatggtaggagttggaattattttagtttaagagatggaagttgtgtgttgaggatgtattaaaggaatgaattaggtttgggttgttttgggtttttataatgattgatatttggattgggatgtgggtttgagtgttgtttagtttttgatgttttagtttttgttatatagttagatggtgttttgattaatttaaggtatggttattattttatttgtttggtagggtaggggttttatttttatatgttgagtttttggtagaatttggtgtaatatatatagttaaagtaaaatgaataggttattttaattaaggtttattttgtgggttggttttggtatttggttttaatttttattttattttatttatttattatttttgagatagagttttatatttgttgtttagtttagagaggagtggtgtgattttggtttattgtaatttttattttttaggtttaagtgatttttgtgttttagtagttgggtagttgggttttttttgagtagttgggattataggtgtatgttattatgtttggttaatttttgtattttttgtagagatggggttttattatgttggttaggttggttttgaatttttgattttaagtgatttatttgttttggttttttaaagtgttgggattataggtatgagttattgtgtttagttagttttggtatttggaattggaaaataatagtttgagttttagaggggataaatataaatatgaggtagaaggaatagtaagtaaatatgtgtttagagtaggttgggttgtttatatttttaaaatattgttaggtgttgaggtttgggttttgtgttagatttttgggtgtagattttgtggggatatttattgggtagtgggatttttggtaagttatattatttttttgagtttttgttgattaagttgtttattgagaataatatttagattgaaaggatttataataatatgtgaaaagtgtttggtttaaaataggagtttggtaattggtagtttttattatttataatatatagtttaatgtttttgttttataggaatgaaaataggatttagataggtaaaatgatttgttgagggttgtatagtgttaatgatagagttaggattagggtttggggttttgattttttttgtagtattttggttttgtgagaagtggttttgggtgaatataaggagtgaggagttggtgagaaattttgaaaatgaagttgggtgtggtggtggatgtttgtggttttagttatttaggaggttgaggtaggaggattgtttgagtttgggagttggaggttgtagtgtgttatgattgtattattgtattttagtttaggtgatttagtaagattttattttagaaaaggaaaggaaaggagaggggaggggaagggagggaatttttgatagtgattttagagataattaggatgatttgaaattattttgaaatgtattaaaaaataaaaataaaatggatttatggttaggtgaaggagggatagatggatggtgaggtgataaagtaggtgtagtttggtgttagtggtagaatttaggtgatggttgaatgtgttttttgtaaaatgtttttaatttgattatgtgttttgaatatttttataatagaatggagggaagagaaaggtaagagggagttattgtagttgttgtagtaggagtagattttaaaatattatgtattagatttttagttttgtttttgtggatgtgtttttgtttttttttttgggatttaaggatatttaatgagtgtatgtgtttttaagtttttttgtttttttatttgtttttatatttggaagattttataggtggtgtgggttagttttttattttgttttttgtgtttttagtgtatgatagatattgagtgagtgttagtttttttttttgatattttgtttgtttgtttagagaggtttttttatagtttagttattaggttgatgtttttggatgtttggttgatagtttttttagttgtgttttagtgatttggtaggtgttttgagttataaataaggttattagtggatgtttttaaagttttttttattatggtgttttttttttttttattaatagtttgttatgatagttagtttgtatgagtttttttttagggttgtgttttttgaggttgtttagtgtttggtttgttagagtttattagatagggtgtttattttttttaggtttgagtttttatttagagaattatttatagaaggataatggagaaaggtagttggggtattaaatggagtgtgtttgtatgtggggggggaggggagggggagggaaagtaggaagagaagatataagaggagaaataagaataagaggaaatatagaaggaggaggagtagttttttttatgggggtggattttgtgtttagttttttattaaggatattatatttattattttgtttggtttttatgaatatttttaaggttgtttttttttggtttttatttttttattaggaagtggaggtatagagtgagaaagagttgtttaaggtttttaggtagtttatggagttattgggagttatatttaatttgtttaattttatgtttttgtttttagttattataataaattattaaggttttatagttataggagtttagtttggagtttttattgggttttttaaggtagggagatggggttggaggttatgttaggtgtatggtgtttagagttgtttaggaagttttgtggtgtgggttgggtattaggtagtgtttgtaggatggagaaatgaatgaggttgagatatagtgttgttttttttaaatgtgattttttttgagtttttgtgattggttatttgagagggtagttttggttttttggtgtttatgtttgggtttagagatgttttttttagttaggtttttttttgaggatggaaatttagaattttattataggaggaagagttgggagtattttattttttttttttttttgagatggagttttgttttgttgtttaggttggagtgtagtgatgtgattttggtttattgtaagttttgttttttgggtttatgttatttttttgttttagttttttgagtagttgggattataggtatttgttattatgtttggttaattttttgtatttttagtagagatggggttttattgtgttagttaggatggttttgattttttgattttgtgatttgtttattttggttttttaaagtgttgggattataggtgtgagttattgtgtttggttagggagtatttttaagatttttgtggagggttgtttaggtttaagttttttattatggaaggttttttagatgtggtagttatggtgtatgggttgagggtttttatttattaagaagtaggagtatttgatgtatatttagtttatgatttttatttatttgggggttgtgtttgtagttatgtgatataagggaatagttatagtagtgggttataaagagagtgtgggttaatgtgtaggggtagaattttgatagttttttatgggttggtagtagggaggggtatatttgtataaattttatatgtatagttttttatatatatgtggttgataattatttatatatttaagatgggatttggtgtatagtttattagtaataggtgttggtaatttttagttgtttttttgttgtggtgtagatattatttaaggtgggatggagagagttattgtttttaaggttatatattttaaagggagatgttgggttatggaatgaaaataggaggattagttagagttattggttttgagttatataatgggatatataggtttatttattttatatttttattgagtaattataatgagttaagttgtatagattatttaaataattggtatgtagaaaagtattttaatttttttttggttttgatgtgatgggaagaatttggatttttggagttatagagttggatggaaattttggtttagttaattattggttgggggagtttgggtaagtgatttaaggtttttgagtttgtttttttgtaaaagagtagtgtttgggtttgttatgttaggttagggtaagatgattgaagagtaagtgtttagtattggttaggggttaatgtttttaaggatgtaaagtgtaataagtaggtgttatgattgtattgttttttattgtttgtggtaaatatataagtaaagatggttttgtgtttgtgttgggggaggtagggaattggttttaggaggatgttggtttttttagttgttttttttaaagttttttgggaggagaaatgatttattttagttgttgggagttttaatttataagtaggtttgtttatttggtagtggttgtatgtaggtaggaggggttttggtagtttttaagagtgaggggttgtttagtttttttttagttggaaaggaggttttaggttgggtaggagtatttggggaaatttagtttttggagttaggttatattagggagatgaggttgttagaagtttttttggtgtttatagtaaaatataattaaagtgggatttagattttaattagtttaaggtttgatttatattagagggaaattagtgtttgttgtatgagtgagtgtttatgtgtgtgtaaggtagagatagattttgggtaagtttttttatttttttatgtttgtttttttatttataaaatggggtaatattatttattttatagggttgttatgaaataaatatgtattaatatttgtaaagtgttgagaatagtatttggtataaaataagagtgatagatttgttaaataagtaaaaaataagatataagtttaaagtagagtttggtatattgtgagtattaagagttgtgttttttgattttttttttttgtggagatttttttattagaagtgggagggattgttgaggttggagttttgttttagggatttttgtggggagttttttagtttagagggatttgttttatggattatatttgttttgggtttttgtgtttttgtgtatgtgtgtatatatgtgtgtatatatatgtaatgtgtgtgtgtgtatttttatggatttgtgataatttgtatatatatgtttagaatttatttgatatagtgttttattaagatgttggagttttgatgaatggattgtggggttgagatattgtttttataggaagttgttttagtagtaagttttttggtttttatagataattaaaaagaatggagtttgtttttattttttgttttaaaaatgatgtatagtgtgtggggtttgatgttggaggtttttttagtagatatatttttaataatattatattttgaaatttaagttgttgtaaaataagataagtaaagatggtattggtagggatttttgaggttttttttatgtatttttgaataatttttatatggtttttgtttgaatgtttttaggtatggggaatttattattttgtgaaatagtttgttttattgtttttaagtgaatattgtgagaaaaatatttttttttgtaaagagttaagttttatttgttagtattttttaggtatttggtattagttttatattttgggggaatttaaaataaatgttttttttttattagataatttattaattatttggagatagtggttgtagttttttgttttatgtagttattttatttagtttttttttggaatttttgatgtgaatataagtttttttgttatgtaggttttttttttgggttttttatttatttgtgtatattttggagaggttgtttgttttgtgggtgagatttattgtgggttgaattgtgtttttttaaaagatatatgtaagttttgattttttagtatttatgaatgtgattttatatggatatagggtttttgaagatgtaattgggttatttgagggtatattgaattagagtgggttttaaatttaatgataggtgtttttataagatagaggtaggttgggtatagtagtttatgtttttaattttagtgttttgggaggtaaagttttattgtttgagtgtaggagtttgagattagtttgggtttttgtttttataaaaaaattaaaaaattagttaggtatggtggtgtgtgtttgtgttttagttatttggaaggttgaggtgggaggattgtttgagtttgggaggttgaggttgtagtgagttatgattatgttattgtattttagtttggaggatagaatgagaatttgtttttaaaaataaattaaaaagataatagagagggtagtttggatagagatataagaagagatatagggtgaaggttaggtggggggtaggttgagttgtaagttgaggaatattaggggttgttggttgttgtagagtttggagaaaggtatgggatagttttttttggaatttttaggaggaatgaatttttagatattttggtttgggatttttggttttagaaattttagggaagatattttggatgtttttgtttttgtttttgtttttgtttttgagatggagttttgttttgttatttaggttggagtgtaatggtgtgattttggtttattgtaatttttatttttaaggtttatgttatttttttgttttagttttttgagtagttgggattataggtatttattattatgtttggttaattttttttttttttttgtatttttagtagagatggggttttattatgttagttaggatggttttgattttttgattttgtgatttaattgttttggttttttaaagtgttgggattataggtatgagttattgtatgtggttgattttggatgttttgagttattttatttgtggttttttgttatgatagttgtaggatagtaatatagggttttagtagggtggtttggtaagggttttttttttatggtagtttttattttgttttatttgtagggttatttagatgtttattttggttttggttagtaagtgttagtgtatttttttatgtttagtagtaagggtagtattgttgttgattaagtatttgttatgttggggtttttgtgtggttttggggttttttttttttgtttatatttggtagtttagtttttttttttgtattttatttgatgttggggttttgggtaagtttgggggatttgtgttttattttatagattttttagttgattttattagtttttgtatagggtttgtttgaagggttgttgggttgggtgttaattagagtttttagtagtagtttttttggttttttgattttggtttatgttttaggggtagggtttttaagggttttggggttgtttttgaggttagtttttttgttgattgtagtttatatagaggagggtttaattttgagtgtggttgtttgtgattttgagagatgtttagagttgtagatgtgttttttaagttttttagagtttgggataggagttatttaatgtttttagtgttataggtaaaatttgttttttttaatataaattgtttttagttttatttaatgttttttttaatgagtagtaataaaaatatggttttttgttaaaggtggggtttatagttttttagaatttggttttttgttaggtttaggtataatttataggagtgtttgtttttgatttgtgtgtgtgtgtgtgtgtgtgtgtgtgtgtgtgtgtgtgtgttgtgtgtatgtgtatatgtgtttgtgtaagtttttttatgtgtagttttgggaagggtggagaggtttatggaaattttttttggtatttagtaagttagaaaaaaggaaaatgagatttgtgtatatatgtgtaagtgtatatatagtatataggtatatatatatatatatttagtatatattatataggtttatatgtgtatatatgtgtaggtatatattatataggtttatatgtgtatatatatgggggtatatagtatataggtatatataggtatatatatttttttgtaggaaagtttttttttgttttttattttgtagggtttttaggttttatgaaataagattgaattttggaagtttgataaaaggtttgtttggagtattttggttatttttattagtttttttagttgtggaaggtatgttttgtggtatttatttattttttgtttttatttttatttttgtttttgtttttttttttttgtttttttagtttatatgttgtttgttttaattttaatttttgtatttggatgggaattattttttttgtagaagggtgtaatgtatgtggggatatatatatatatatatatatatatattgtattggaggagagaagagaggtagagttttttttagatttagagttttagtgagtgatgggattttttttagagaatatgtgtagaagtttgtgttattggaagaagatattattttgatttatattttttttttttttttttgttttttttatagagaaggaaaggttttagtaaatagtggttatgtgggttttttgtatgttattggtagttttttagttaggattattttttttttatttttggaagtataagaatagagagaagggtgagtttttgtttttgggggtttttttttgtatttttttggagttaattttagggttgtgggttgtataggaaggagggtttaataggttttttgtttaattttgtttttttagtgaggagttgatttattttgtttgtaaaagatgttggttgggatttgatgttgggtaatttgaggagaagagaagggggataggggttgaggttaggtttttggttttgaaatagttataatttttggggtagagtttaagggtgttaggttggagattttatatttggttagttggtagttattattttggtttagttagtggtttagggtattatagttatttagattaggaattttatttttttggattgtattaatgaggaaggttgagtttgtaggttttatatatttatggtaattttaaggtagagaggttattgttaattgagggttatgggtaggagttttgtgagtttattagtaagtttggaagattaaggtttttggttatagagagtagttgttatttggttaattttgtagaaaatattatagttttggataaaatatttgaaagaataaaataataatagtttggagttagtatagaatattttaagtaggtagaagttggagtagagtttatatttgatagaggggaataaaattagataagtttttggtttttggaggtttttttgtttagaggtaggtattgagtaattaaatttggataaaaagttttaaaagtatttagggaaaaataatatgtggtttataggggaatagttagatgaatgttgattttttgatagaaataatggaggttaaagatattggaattttatattttaaagttttgaaagaaaaaattgataatttagaattttataattagtgaaattatggtttaagaatgatagtaggttgggtatagtggtttatatttataattttagtattttaggaggttaaagtaggtagattatttgaggttaggagtttgagattagtttggttattatggtgaaattttatttttattaaaaatataaaaattagttgggtatgatggtatatgtttgtagttttagttatttgggaggttgaggtaggagaattgtttgagtttgggaggagaaggttggtgagttgagattgggtaggagttttgaaattatattattgtattgtagtttgtggggagatagagtgagattttgttttaaaaataaaaataaaaataaaaaaagaaagaatgatagtaaaataaagatttgtagataagtgaaaatgaaagggaattagttgtttgtaaatttgtattataaaaattgtgaagtaagttttttaagattatgggaaatgagattagatgggaatttagttttttaggaaggaatgaagagtataggatatagtaaatatatgggtaaatagaaaagattttgttttatttttaatttttttaaaatgtatggggttgtttaaagtaaaaatttttttattgtattgtttagtttataatgtgtatggatgtagtaaatatttaataattattatatataggatggaaagtggtaaatgaatttataggattgtttagtttttatattttttttttatgaagaaaaataatgttaattttaagtagattgtgaaaagttaagaatgtgtaatagaatttataaagtaattattaaaatagtaatataaagagatataattaaaaagttaaaataggttgggtttagtggtttatgtttgtaattttagtattttgggaggttagggtgggtggattgtttgaggttaggagtttgaggttagtttggttagtatggtgaaattttgtttttattaaaaatataaaaattagttggttgtggtggtaggtgtttgtaattttagtatattagggaagttgaggtaggagaattatttgaatttaggaggtagaggttgtagtgagttaagattatgttattgtattttagtttgggtaatagagtgagattttgttttaaaaaaaaaaaaaaaaaaaaaatataaattaaaatagaattttaaaaaatatttaattaatataaaagaagttaagaaagtaagatgaaagaaataaatattaaagagtaaggtagtagttttaaatttagttatatttataattatgttaaatagaaatagtttgaatattttaattaaaaggtggaggttgttagaatgaataaaatagtaagatttaattatatattatttataaaagatgttgttttagtataaatataggttgaaattttttgtttggaaaaagatatattgatgttgtttgaatgatgatggagttatgttttgataaatttattataagtggaaaataaatattattttaaaaatgtatttaatatatttaatttattgaatattttagtttagtttagtttattttaatatgattagaatatttattttagtttatagttgagtaaaattaataaatataaagtttattttataataaagtgttgattattttatgtaagttattgaatattgtattgaaagtgagaaatataatggttttatatatatttaaagtatagtttttattgtatatatattatgtttgtattatggtaaagttgaaaaattgtaagttaaattattataagtttttttataagtttttttagtttttttatgtattttaaatagtatgtttaagaaggttggagaggttatataaatattaataaagttgagtttaagataaaattattatgagataaaggaatatatttattatggttaaatgattagtttattgagatattattataattataaatgtgtatgtatttaattaaaggagttttaaaatatatgatataaaatttgaaagaattaaagggagaaatgggtaattttataattataggtggagattttttttttttttttttgagatggagttttatttttgttgtttaggttggagtataatggtgtaattttggtttattgtaatttttattttttgggtttaagtgatttttttgttttagttttttgagtagttgggattataggagtttgttattatgtttagttaatttttgtatttttagtagagataaggttttattatgttgtttaggttggttttaaatttttgattttaggtgatttatttgttttggttttttgaagtgttgggattataggtgtgagttattgtgtttggatgtatagttggagattttaatattattttagtttatttaggatgttaaaataaaatgttttaggttgggtaatttataaatagattgtagtgtttatagttttagaggttgggaagtttaaaattagggtgtttagtgtttggtgagagttagttttttgttttagagatgttttttttttgttgtgtttttatatggtagaagggattaattttatttatgatgattttgtttttatgagttaatatttttttgatgttttaatttttaatattattgtattagagattaagttttaatatatgaattttgggggatataaataggtaggttatagtaaatattatttttttaatatttgagaaataagtattagataatttgaagaatattggtaattagtaattgatttaattagtagttataaagttttatatttaggaagtttagaatatatatatatattttttttttaagtgaaaatagtgtatttattaagatatatattttgggttataagttttaaattttaaaagtatgtaaaatatgtttgtttggttaaagtaagattaaattagaaattaatagttttaagatatttagaggagttttgattatttgtaaattaaataatatatttttaaataatttatgagttaaagaggaaattataagaaaaattttataatattttaaatgaaatgataatgaaaatatagtatattaaaatatgtaggttgaagttagtgtttagagggaaattgtaagtgtttatattagaaaagaagtaaaaaaaaaaaaaaaaaaaaaaaaaaaaagatttaaggatttgttttaagaatttggaaaaatgggttaggtgtagtgtagtttatgtttgtaattttagtattttgggaggttaaggtaggtggattatttgagattaggagtttaagattagtttggttaatatggtgaaattttgtttttattaaaaatataaaaattagttgggtatggtgggtatttttagttatttagaaggttgaggtaggagaatggtttgaatttgggaggtggaggttgtagtgagtttagattatgttattgtattttagtttgggtaatagagtaggatgtttttttaaaataaaataaaataaaataaaataaaataaaataataaaaaaaataaagaatttggaaaaatatgttagttatttatgtattgttttttaattttgtatatattttgttaggttttgttttgtgatattggattgaggttttatgagtttttttttttggttaaatatagttatgttaggttttatttataggggataatattgtggggagttgttaggttttgttgaggtagtagtttttttttttggttttagggttttttttttttttgaaggtatagttgttagtggtgtgtgtttagtggggtttgttttgtattgagtttttttagtattttagttttagtttaatgggattttagtaaattttttagatatttagtttttgtttatttatattttttagtaggttttttggttatttagtaagttgattttgtagatttattttttttatattttttggtaagaatttttttgttattagtaggttgtaggtttttgtggtagttatatattttttaataaggtttgaatgtaagatgtggtaaggtgtggaggatgttttgagtttttggttttttttttattaattttagtggtagtaattgtttttgtgtgtttgtatatatgttttaaagtatttattatagaaaatttattattttaattatttttaggtgtgtagtttggtggtatgaagtatatttatattgttgtgtaattattattattatttattttatttttttaaattgtaattttatttttattaaatattaattttttatttattttttttttttttagtttttggtaatttttattttattttttgtttttttgaatttgattattttagggattttataaaagtgaaattatatagtatttgtttttttatgtttggtttttgttatttagtatgtttttaaggtttatttatgttatagtatgtgttagaattttttttttttttttttttttttttttttttgaggtagttttgttttgttgtttaagttggagtgtagtggtatggttttggtttattgtaatttttatttttttagtttaagtgatttttttgttttagtttttttagtagttgggattataggtatatgtttttatgtttggttaatttttgtatttttagtagagatagggttttgttatgttggttaggttagttttaaatttttgattttaagtgatttgtttattttggttttttaaagtgttgggattataggtgtgagttattatatttggttttttttttttttttaaggtagaataatattttattgtatagatggattatattttgtttgtttatttatttgttggtggatatttgggttgtttgtattttttggttatgggaaaagtgttgttataaataagaatgtagtatatttgtttaagtttttgttgttagttttttggagtatatatttagaagtggaattattggatgttatggttattttgagtttaattttttgagtaattgttatattttttttatagtagttgtattattttatatttttattagtagtgtatggggttttaatttttttatatttttgttaatatttgttgttatttatgttttggttaatagttattttaaagggtgtgaaattatattttattgtggttttgatttttatttttttgatgattagtgatattgtgtatttttttttgtgttttttggttattggtatgttttttgtggaaaaatgtttgtttattgggttgtttttttttgttttgtggtttagttgtaggagttttttatatattttggatattagttttttattggatatatgatttttaaatatttttttttattttgtggattttttttttatgttattggtagtattttttgatgtataaaagttttaagttttggtgaagtttaatttattatttattttttttgttgtatttttggtgttatatttaagaaagtattgttaattttaatgttatgaagttttttttttatgtttttttttaaagtagttgttttttatatttgttttttttatattttttagagtttttttgtataaggtaaaataaattttatttttttatttttatttataatatttagtgttttagttttgatattagatgtgtggtttttttttgttgatttttaagtaattttttaatatttagtagtttttaattgggtgttttgtaatttagtttaattttgatattaattagagttagtgtagattttataggttaagggttttattttataagattgtttttaattttagagattagttgtaagtggtaagatattaggttatttataatttttgtttgatttggttataaatttgaggtttttataattttttttttaggtttaataatttgtttgagtgatttatagaatttaggaaattagtttatttaaaattgttgatttattataaatgatattttaaaggatataaatgaatagttaattggaagagatgtataagaaaggtatgaaggaagtggtatggagtttttatgggagggtatattgtttttttagtatttgtaggtatttaataatttgaaattttataaattttatttttttgggtttttagggaggttttattatataagtatgatatgaaatttttggttattgatgattaatttaatttttatttttttttgttttgtaggaggtggatgggaaaggttgtaagttttagttttttaattataaggttgggttttttggtaattagtttttatttttaggttgtttaggagtttttagttattagttgtttttttagtaaataaaaagatatttattattttggagattttaagagttttaggagttatatgttaaataaagttgggggatagagattagatagatagatagatagatagatagatagatagatagatagatagatagatagatatattgatttttgagatagagtttttttttgttatttaggttggagtgtagtagtgtaattttggtttattataatgtttgtttttttgggtttaaattatttttttattttaattttttaagtagttggaattgtaggtatatattgttatgttaggataattttttgtatttttggtagatatgaggttttattatgttgtttaggttggttttaaatttttgagtttaagggatttgtttgttttagttttttaaagtgttgggattataaatatgagttattgtattgagtttagtttaaatatattttttttatattataatgttatttttttgtgatttttttaatagttaattattttttatagttaagaatattttatattataagttgttatttaaattgttggtgtggtttttgttttttgattgggttttgattaatgtgttgaagtaagtataaggaaggaagtaatgaagataatagagaaatttaaggaaatggatattagaaaaggggagtttaatgttggttttttaaaaagatttagattgataattttttagttaggttgttgatgagagggagatggtgaatataaagttataataaaaggaatgaagtgttttttttatggattttattgatattatagtgataaggaatataggtatattttattttattgtgttttatagatattgtattttttataaattgaaggtttgtggtagttttgtattaagtaagtttgttggtattatttttttaataatatgttaatattgtgtttttgtgtaggagtttgatgatttttgaaatagtttaaatttttttattattattatatttgttatggtgatttgtgatttttttttttttttttttttttttgtttttttttttttgagatagagttttgttttgtttggagtgtagtggtgtgattttggtttattgtaagttttgttttttgggtttatgttatttttttgttttagttttttgagtagttgggattataggtatttattattatgtttggttattttttttgtatttttagtagagatggggttttattgtgttagttaggatggttttaattttttgattttatgatttgtttgttttggttttttaaagtgttgggattataggtgtgagttattgtgtttggttttttttttttttttttgagatggagttttgttttgttgtttaggttggagtgtagtggagtgtagtggtgtgattttggtttattgtaatttttattttttaggtttaagtgatttttttgttttagtttttttagtagttgggattataggtatttgttattatgtttggttaattttggtatttttagtagagatgaggttttattatgttggttaggttggttttaaatttttgattttaggtgatttatttgttttggttttttaaagtgttgggattataggtatgggttattgtgtttagtgattagtgatttttaatgttattattgtagttgtttttggggtatgatgagttatatttagataagatagtgaatttatttaataaatgttgtatgttttgattgttttattgattggttgttttttgttttttttttttttgtttaggtatttttattttttgagatttaataatattgaaattaggttaattaataattttataatggtttttaagtgtttaagtgaaaggaagagttatttgttttttattttaaattaaaagttagaaatgattaagttgagtgaggaaggtgtgttgaaagttaagataggtaaaagtgagattttttatgttaaatagttagttaagttgtgaatgttaagaaaaagttattgaaagaaattaaaagtgtgattttagtgtatatatgaagaagaagaaagtaaaatagttttaatgttgatatgaagaaagtttgagtggtttggatagaagattaaattagttataatatttttttaaataaaagtttaatttagggtaaagttttaattttttttaatggtatgaaggttaagagaagtgaggaagttggagaaggaaagtttgaggttagtagaggttaggttatgaagtttaaggaaagaagttatttttataatgtaaaagtgtaaggtgaagtagtaggtgttgatggagaagtggtagtaagttatttagaagatttagtttagagtattgatgaaggtggttatattaagtaatagaattttagtatagatgttttattttttattggaagaagatgttatttaggatttttatagttagaggggagaagttaatgtttgtttttaaagttttaaaggataggttgatttttatgagaggttaatgtagttgttgattgtaagttaaagttaatatttattgattgttttaaaaattttagggtttttaagaattttgttaaatttattttgtttatgttttagaaatggaataataggttttatttgatagtatatttgtttatagtatggtttattgaatattaaaaatttattgaggtttggtgtggtaatttatgtttgtaattttagtatttttgaaggttggggtggggggattatttgaggttaggagtttgagattagtttggttaatatggtgaaattgtatttttattaaaaatataaaaattatttaggtatggtgttatatgtttgtaattttagttatttgggaggttgaggtaggagaattgtttgagtttaggaggtggaggttgtagtgagttgagattgtgttattgtattttagtttgggtaatagagggagattttgttttaatttgaaaaaaaataaaaaaataaaaaagggttaagtatggtggtttatagttgtaattttagtattttgggaggttaaggtaggtaaattatttgagtttaggagtttaagattagtttggttaatatggtggtgaaattttatttttattaaaaatataaaaattagttaggtatggtagtgtatatttgtagttttagttatttaggaggttgaggtaggagaattatttgaatttgggaggtggaggttgtggtgagttgagatagtgttgttgtattttagtttaggtaataaagtgagattttgttttaattaaaaaataataataaaaaaaaaataaatagggtttggtgtagtggtttatgtttgtagttttaatgttttgagaggttgaggtaggtggattatttgaggttaggagtttgagattagtttggttaatatggtgaaattttgtttttataaaaaatataaaaattagttaagtatggtggtgtgtgtttgtaattttaattatttaggaggttgaggtataagaattatttgaatttgggaggtagaggttataatgagttgagattatgttattgtattttattttgggtgatatagtgagattttattaaaaaaaaaaaaaaattattgagatttattgtttaggaaaaaagaatttttttaaaatattattgtttattgataatgtattttgtgatttaagagttttgatggagatgtatgtaaagatgaatgttgtttttatgtttgttaatgtaatatttattttgtagtttatggagaagggataaatttgatttttaagttttattatttaagaaatatattttataaagtagtatttgttatagttagtgatttttttaatggatttgggtaaagtaaattgaaaattttttggaaaggattttttattttagatgttattaagaatatttgtgatttataagaagaggttgaaatattaatattaataggagtttggaagaagttgattttaatttttatggatgagtggtttaagattttagtagaggaagttattgtagatgtggtggaaatagtagagaattagaattagaagtggagtttggagatgggattggattgttgtaattttatgattaaatttgaatagatgaggagttgttttttatggatgagtagataaagtggtttttggagatgggatttattttaggtgaagatgttgtgaatattgttgaaatgataataaaagatttagaatattatattaatttatttgattaatttgtggttagggttgaaagaattgattttaattttgaaggaagttttattgtgggtaagatgttattaaatataatgtgtgttatagaaaaattttttatgaaagaaagagttaatttatgttaaaaattttagttaagaaattgttggttaggtgtagtggtttatgtttgtaattttagtattttgggaggttaaggtaggtggattatttgaggttaggagtttgagattagtttggttaataaggtgaaattttgtttttattaaaaatataaaaattagttaggtgtggtggtaggtatttgtagttttagttatttgggaggttgaggtaggagaattgtttgaatttgggaggtagaggttgtagtgagttgaaattgtgttattgtattttagtttgggtaatagagtaagattttgttttaaaaaaaaagaaaaagaaaaaagaaataaagaaattgttgttatagttatttttaatttttagtaattattatttggttagtagttattaatattgaggtagattttttattaagaaaaagattatggtttgttgaaggtttagatgattattagtattttttagtaaaaagatataatgattttatatattttaatagattatagtatagtgtaaatataattttttttttttttttttgagatggagttttgttttgttatttagtttggagtatagtggtgtgattttagtttattgtaatttttattttttaggtttgagtaatttttttattttagttttttaagtagttgggattataggtatgtgttattatatttagttaatttttgtatttttaatagagatgaggttttattatgttggttaggttgtttttaaatttttaattttaaatgatttgtttattttggttttttaaagggttaggattataggtatgagttattatgtttggtttaaatataatttttatatgtattgggaaattaaaaagtttgtgtgatgtgttttattgtaatatttgttttattgttgaggtttggaagtaaattttaggtatgtttgtattatgaataattttaaatgagtaaatttaataatttatttgaaagggataaatttttttaaagtataatttattaaaagtaagataaggggaagtaaaaaaatttgaataattttttttatatattaaattgaatttgtgattaaaaataaataattattttttttagtagaaaattttaggtttagatggtttttttggtggattttattaaatatttaaggaagaaataatattaattttatgaaaatatagaaaataaagagaagggaatatttttaaattaattttatgaagttaaaatgaggttgataaagatattattgaaataaattaataaataaagaaaatattatattaatattttttatgaattaatatgtaaaaatttttaaaaattgggtaaattaaatttagtaatatataaaaaggatgatattttataagtaagttggattttttttagaaatgtaaggttggtttaatattaaaaaattaggtttgtatagtggtttatatttgtaattttagtattttgggaggtagaggtgggagtattgtttaagtttaagaattgtagattagtttgagtaatataatgagattttatttgtataaaaaattttaaaaattaaaaattagtttggtatggtggtatgtgtttatagtttttgttatttaggaggttgaggtgggaggattgtttaagtttaggagtttaggttgtagtgagttatgatggtattattgtgttatagtttgggtaagagtgagattttgtttttttaaaaaaaaaaaaaaaaaaaatggggggtaaaaattaattattgtaatttattttattaaatgaataaaagataaaataatgattatttttatagatgtagaaaaagtatttattaaaattatatttatttatgttaaaaaattttagtaaattaagaatagaagggaatttttttaatttgataaaggttatatatgataaatttaaagttaatattataagtttggtataggtaaggatgtttattaattattattatttaatattgaattggtagttttaattagtgtaataaagtaagaaaaaaaaataaggtattaagattagaaagaagtaaaattatgtatttaaattttaaaagatttataaaattattattagagtaataaatgattttggaaaagattataggatataagatttatatataaaaatttattgtatttttatatattagtagtaaataattaaaaatgaaatttaaaatttattttagtttaaaatagtgttaaaagtaaaatttttaggaataaatttaataaatggtatgtaagattttttttttgaaaattataaaataatgtaattttgtagagatttttttttagtagagaaataaaagaaatataaaaggatttttaaaatggagatatattatttatataaaagatttaatattgttaaaatgttaatttttttttaattgatttatagatttaatataattttaattaaaatttatattgtatttttgtagatattaataagttattttttaaatttataaggaaatttaaaggatttagaatatttaaagtaatattttagatatttgagagattttatattaagatttattgtaaagttatattaattaagatgtggtattagtaaaggaatggataaaatattaagaaaatataatagtgttttaatatagggtttatatgtatatagtatatatattaatataggattatatatatagttaatataggatttatatgtatatagtatatatattaatataggattatatatatagttaatataggatttatatgtatatatgtatatatattaatataggattatatatatagttaatatggggtttatatgtatatatgtatatatattaatataggattatatatatatatatagttaatatagggtttatatgtatatatgtatatatattaatataggattatatatatagttaatatagggtttatatgtatatatgtatatatattaatataggattatatatatagttaatatagggtttatatgtatatatgtatatatattaatataggattatatatatagttaatatagggtttatatgtatatatgtatatatattaatataggattatatatatagttaatatggggtttatatgtatatatgtatatatattaatataggattatatatatagttaatatagggtttatatgtatatatgtatatatattaatataggattatatatatagttaatatagggtttatatgtatatatgtatatatattaatataagattatatatatagttaatatggggtttatatgtatatatgtatatatattaatataggattatatatatagttaatatggggtttatatgtatatatgtatatatattaatataggattatatatatagttaatatggggtttatatgtatatatgtatatatattaatataggattatatatatagttaatatggggtttatatgtatatatgtatatatattaatataggattatatatatagttaatatagggtttatatgtataaatgtatatatattaatataggattatatatatagttaatatagggtttatatgtatatatgtatatatattaatataggattatatatatagttaatatagggttgatatgtatatattaatataggattatatatatagttaatatagggttaatatgtatatatgtatatatattaatataggattatatatatagttaatatagggtttatatgtatatatgtatatatattaatatagggttatatatatagttaatgatttttagtaaaggtgttaggtaatttaatagagtaaggtatgtttttttaataaatggtgttagaattggatatgagtatagaaaaataagaattaattttgattttaaattaaatataaaaattgatttaaaatggattatataatattttgatggttataataggttaaaaaatgtaaaaatttaaaaaattaaaaaataaaaggaattatagaatatataattataaaatttttagaaaataagagaattttttttgattttagtgtaggtaaagattttttttataggttataaaaattataaattgaaattggaaaaagttgataaattggattttatgaaaataaaatatttttgtttattaaataatattattaagaaaattaaaaggaaaggagtaatgtggaaaaaaaaatttatgatatatatatttgataaaggatttatatttagaatatataaaaaatatatgaaataatatttttttttttttttttttttgagatagagttttgttttgttatttaggttggagtgtagtggtgtaattttggtttattgtaagttttgttttttaggtttatattatttttttgttttggttttttgattatttgggattataggtgtttgttattatgtttggttaattttttgtatttttagtagagatggggttttattgtgttagttaggatggttttgattttttgattttgtgatttgtttgttttggttttttaaagtgttgggattataggtgtgagttattgtgtttggttaattttttttttaaatgagatttatggggaaatagttaaatgaagaaataataaagtagtaataaaataaaatttaagttttattttattgtgtagttgtaggataaagagtagaagtttgtagttggggaataaggtgtttatttttttaagtattataaaatgaaggttttagaaattatttgattttgaaataatataattttaaaaagaagtaagatgtggatagataattttataaaggaaaatatgtaaatgattaataaggattttggaaaattgtgtgattttataagttattaagaaaatataaaataaaagttttaaaaaaaaatgaagtttggaataattgaataaatatataaaatgataataaaatgaattttgattttttattttatattatatgtaaaagttaatttataaaagttatataattttaagttttttaaaggaaaatataaatatttttgtaatttggtagggtaggtaaaggttttttataaagaatatagagagagaattataaagaaaggagtttgttaaattagattttataaaaattaaagtgatatatttttgtttattggaaaatattattaagaaaatgaataggttgggtatggtggtttatgtttgtaaaattggtttttggggaggtagaggtaggaggatagtttgagtttaggagttttagatttgtttgggtaatatagtgagattttgtttttgaaaaaggaaagaaaatgaataggtaagttatagattggaataaaatatttgtaaaatatgtatttgataaaagattagtatttagaagaaaaagttaagtaatttaattttaaaatgagtaatagatttgaaaagatattttataaaggaaaaatatatgaagagttaattatgaaaatgtgtttaattgtattagttattaggttaaagtaaattaaagttataatgagatgatattattatatgtttattagaatgattaagattttatagagtgatagtattaaatgttggttaggatgtggagtaattagaatttgtatttattgttggtgggagtgtgaaatggaagggttattttgggaaaagatttggtagttttttataaaattaaatgtatatttattttatatttattttaggtgtttttatagaataaatgaatgtttatatgtatagaaaaatttgtataagaagaattagtgtaataggtttatttataagagtttttagatggaaatagttaggggttttttaataagagaatgattaaaaatttatagaatgtttatatagtggatgttatttagtaataaaatagaataaattgttggtatttgtagtaatatgggtagttttaagaaatatttaaattggtaaaattattttgtggtggaaaaaaagtataattgtggttgttttggggaaggtggggattgtgatgtatttggaggggtatgaggaatttattggggtgatagtgatgttttatgttttggttaggttgggatatatgtggatatttttgttaaaatttaaagaatggaatgttttatatttgtgtattttagggtatatatattttattttaaagaaaaataaaaataattatagataaatgttggattttagttaatgaaatgtaaattgaggtgttgataggatgttgtgtgttgatttttgtagtttattttaagtgtattaaaattagtgtggatgttggtggttagagggatttgtggtgaagtaaatagtaaaatggttgttgtggaatttaggtggtaggtgtatgggtgtttattttagaattttttatggttttttttttgtggttttgttttgttttgtttttgagatagggttttgttttgttgtttaggttggagtgtattggtataattttagtttattgtagttttaattttttaggtttaagtaatttttttattttaattttttgagtagttgggattttaagtttgtattattatgtttgattaattttttgtattttttatagagatgggattttattatattgtttgggttggttttgaatttttgggtttaagtgatttttttattttaattttttaaagtgttgggattatagttatgagttattatatttagtttttttttattttttttatgtttgaaaagttttatggtaaaaagttggaaaaatgtaaaaaagattgaaatttattaattaaaaataggaaaaataaaataaaagagatggtaggagattattttttttttttttaatttagtttttaattttttttttttttgtttagttaggataggaattttaagggtttgggttttttgtgtttgtgtggggaaggaggtatttttgtgtttgtgtgggggttggttatttgttttttggtgtattttttgtattttatttttttttgtttgtagtgagtagttatagttggtggaaattatatttaggtagtttttgtttataaatttagtgaaaatgtaaattttgtaggagttggatttttgagagtttgtggtgttatttgttggaggaaaggttttttgtatttgagtttttttttttttttttgttgttatttgtttttttgtttaggttgggtgggttttttttttgtaattttggggtattggtgtatgggaaatgtttagtgttttataatttttttttatttatattttaatatttagtttttagtggatattgtttttgtttgataaatatattatataggtatagtttaagattatttattttaggaggagtataagttttagtgtttattattttagtttttttttttttttttttgatgtagtgatataggtttaggatattgaagatttttgattttataaatatgttgaagttaattattttgaagttgtagtttttattattattattattttttattttttgtaaagataaagttttgttatgttgtttagtttggtttggaatttttggatttaattgatttttttgttttggttttttaaagttttgggattgtaggtgtgagttattgtatttagtttgaagttgtagttttttaattattgttaatagtaatatttatttttttgtgagtagtagggtttgttggtatggttgatagttttgtattattgtattgaatttgttgtttgggattttaggtgagttttgatttttagttggagggataagttgtgtggggttgggtagggtgaattgtgggagattaagtttagattgagggttataagttatatgagtattggggttaggtagggatagtgaaggagatagtgtaattttgaggaaagataatgttatagaatggagaggtttaggtttggggtttttttttgttgttggataggtatgtttgtgttttttttttagtttttgtgatggttaagttatgtgttttttgagaggtaagtgaggtttttgatagtaggttttaggttttaattaaattgtttgttttgtagggtgagttgtataggtgtttttatttttgatttttttgaatttttgttgtttttaagttttatttattttttttaggtgaatagaaatattgtttaggggagaatggaggaagaatttaggaaaggttgtttgagagtttggttgagtttatgttattgttaagagtagtgttaaaatttaggagttggtgagattatggtttagggtttatattaatatgagggggtgttagttttatgattaatgagtttttgttttattattttttgttatttatattttgagggttatagttagtatgtgaattggagttggtttttggtatttttttttttatattagttttataatgtgaggtgggggtttgtttttagaggtatttggagtagtaggtgttttaagagggggaagtttttttgaagtttttttttatttatggtataggatgtagaggggatagagtattaggaatatttagtgattataggggtttgttttgaaggagaggaggtaggaggtagggagagtggttgggaggttagttttggagtgtttattttttattttgagggagaggaaggaagtagaaggtgagtatagggagttttagttggggatggagtgggggttgtagtttgattgtgttgtttggagtgggggtatggattgtagtttttatttatttgtttggttagtttgaagttattttaagtttggagattttatttgttttgtttattttttttagggatggtgtttaaattttgaagttttggttggtgttgtaaatatgggagggaggttttgttttattttagttttaagagttagttaagaatgttttggatatttgaattttgttttgagttagaggttgggaagaaatttgaaggatggtgggatggtggatagtagtttttaggtattaggtattagggtttttgtttggggatgggggtattagtaggtgttaagtgtattatattagggtttattatgtttttgtttagagatttagtattttatgaaataggaaggaatgagggatgagtgtgtttttttttttaatattttagtttttgttttgaggttgttaggtatttaatttttttaggatttaaattattttggttttatttatggttaagtgtattaaattatagttaggattattgggtttagatattaaaagtgttttttttaaagttggtagttattagggtagtatagggtagtgtaaggttgggtagggttggttatttgttagtatttagtggtttttgttggatgttgatgggggtagttaggtaggtgggtttatttagtaattaaagagattttttttttttaattttttttttaaagagattttgattttttttttttagttgtagggtttgtagtagttttttttttagtaggtttttttgtttgtttttggttatttttagtagttatagggtattgaggttttattatagtgagaataaaattaagtttttattagggtttttaaggtttggtatgatttggttttgtttgttgtattggtgttattatggtttgtttttgaaaatatattttagttatttttattttttttaggttttagttttgggtttttatatttgttgttttttttgttaggttgttttttttttggattttggtttggttgggtttttttggttattatagttttagtttagtgttattatttagaaagggtttttattaatttttttgttatatatatagatatgtatttttagtaatttgtttttagtttttttatagtttttatttaaaattatttatggatttgtttatttgtggattgttttttagttttaattgttaagtaataagtgattagtgattgtgtttttgttgttttttattataggttaagtatttaagagaggggttgtatatagtaggttttaataaatatttattagatgggttaggtatggtggtttatgtttgtaattttagtattttgggaggttaagttgggtggattatttgaggttaggagattgggattagtttgattaatatggtgaaattttatttttattaaaaatataaaaattaattaggtatggtggtggatgtttgttattttagttatttgggaggttgaggtaggagaattgtttgaatttgggaggtggaggttgtagtgaggtgagatggtgttattgtattttagtttgggtgatggagtgagattttgtattaaataataataataaaatatttgttagaagaattaaagtagtttgtttgtgtttaataggaatttaagagtataagatgaatttaattaaaggatatatatagtaggtattttatagttgatatttgttggtggagggagattaggaaagtggggagaggtagtgtttgggtatggggatattttgggtatggggatgttttggatatagggatatattgggtatggggatattttgggtataggatgttttgggaatggggatattttgggtatggggatattttgggtatggggatgttttggatatagggatattttgggtatggggaaattttgggtatggggatgttttggatatagggatatattaggtatggggatattttgggtatggggatgttttggatatagggatatattgggtatggggaaattttgagtattgggatgttttaggtatggggatgttttttgttatttgaaattttgtagttttattatatttgtttgttttagtaaattggtttaaagagtatttttaagtttttatggtaaagttttagagttagtgtttttttgttgattttgagggtgtgttgtttatttagtgtttaagttagagtttttttatttagaaaaaaaaagaggagggtggttttatggatggaggtatgagggtgtttataggtagagggagtttttgggttgagatttgtgttattttttgttttaattttaaggtgtagtttggagtttaaattagtttttaaatgtgggttgttggttaagaggaatttttttatttatgatttttttttatatttagtttttattgtttagagtatgttagttttgtttgttttggtttttaggatttttttagggatttttaggttttaagttagggtgggtttgaattaaggtagttttagaatttatgttaatgtttttgttagtgggagattttggggagtattgtgtgggatgtatggggttaggtgggggtatatagtgagtggttttagaagttttggttgtttggagtgggggggtgtttagagtaagagatgggttaggaagttggagtgagtaaggaggttttagtttttggtgggagtaggttgggtaaaaataaattaatttgagggtagtagttagtgagattattataggaggggtggtggggttggaggggttttaggagtttaggagagggaggtattgttagaggtaaggttggtagatgagagttagtgttggtaggattaatttgttatagtagttatggtttattttttttttttttttttatatatgtttttggggtttatggaatttattagtttattataaaggatattataaaggatataggggaagagatgtgtagggtaaggtatgggggagggatgtagagtttttatgtgttttttaggtgttttattttttaggagtttttatatgtttatttatttagaagtttttggaattttatttttttgagtgtttatggaggttttattatgaaggtatgattgatttaattattggttgttgatgatttgtttaatttttagttttttttttttatttggaggttgtggggtggtgttgaattttgtgattttatttggttttttttgggaattattttgaagttgttagttggtttgttaattatgagtatttaaaaagatattattttggagattttaaggattttaggagttgtgtgttaggaaatggagatgaaaattaagtgtatattttataatatgatagttagttttttttaattttagttttattttttgttgtgttgttggttttagttttttgtgttttagggtttttgaatatattgttggttgtttgtagtgattgtttttgtttgttgggtttgagtttggtttattttttttatttttttgtgtttagtttgaaggtgtttttttgaggtagtttttttgatttggttttatgaattgtaggttttgttttgttattggttttttttgttatatttgttattttttgtgttttatgtttattgatgtggttttgtatttgtgtagttttatgagggtaaggattgtgtttggttttgttttttatgggattttagtgttaagtttatagggagtatttaatgttgaatgaatgaatgagtgattggtaagggaggtttattttgttatgttgggggttaaaggttgttgggtggattatatgggtgaggttgggtggggagggaagtagagatgattttttggaagaaggggtaggaggtggggaggtgggtgtggggtgttgtataaggatggtaagtgtttttaggggtgataagttaatttagagtattaggtagtagaaaaaggttgatatttttatgttttatttttatttagggagaggttaggtttttgggaaagttagttttttgttgttaggagagttttaagggaagttttattagttgttgagttggttatagtggaaatttatgtggtgggtgggaggggtttgaggtataggggtttgggtggtggttttaggatggagatttgtgtttagattatgaggggtggttttagggatgattatttttaaataggaagtagataaaggtatagatggtagaagtggaggtagagaatgggttgtaggggtttttttagagggagagttgagtaaggggataggttggaaatatttagtttttatggtttgaagtatagatagttggttttatatgtaggttgggtagttatattatttagaataaggggtatgtttgtagggtaggttttaggatgttttgggttggttttgttattagtttagaaagatggtttaggtttttttggtagggagtatgtttagttaggttttgggtaggagttgagattttttggttggtttgagaggggatgattgagtgtaggtttagtttgggatttttttatttttttttgttatttagtggaattagttgggtgtgagaaaagaagagaagtgaattaagagtttagagtatgaggttggattagtttttatattatatgtaaaaattaatttaatttgtattaaagatttaaatttaagagttaaaattataaaatttttagaagaaaatataggggaaaagttttttgatgttgtatttggtaatgattttttggatatggtgttaaaagtataggtaatagaagaataaatagataaagtggaatgttatagaagtttaaaatatttgtatattagtttgggtgtggtgatttatgtttgtaattttggtattttgggaggttgagatgggtggattatttgaggttaggagtttgagattaatttagttaatatagtgaaattttgtttttattaaaaatataaaaattagttgggtgtggtggtgggtgtttgtaattttaattatttaggaggttgaggtaggaaaattgttggaattagggaggtggaggttgtagtgagttaagattatgttattgtattttagtttgggtaatagagttagattttattttaaaaaaaaaaaaaaaaattgtatattaaagggtattaataatgtggggagaaggtaatttatggaatggtagtaaattataggttagatatgggattagtatttggatattaatttatagattttttaatatttagtaataataattatttaaattaaatataggtaaaggatttggatagatatttttgtaagaatatgtgtaaatgagtaataaatatgaaaagatgtttaatattattaattattggggaattgtaaattaaaattataaggagagattttttataattatgagttttgggtaggtaggaagatgtttggtggggagttgttggttttatgttgtttttagaatttttgtaggggttaagtttgattttgatattttattaggagtatagaaatgagtggaaaaggttaaaggttattttaaagggttagaggggtttagtaaggagtttgggatatggaattatgttgtgtatttagatatatggggataatagggggatgaaaggtggtttttaaaatttatatttattttagagtttatgaatatggtttatttggaaaaagggtttttgtagatgttatgaagttaaggattttgagatgggattattttgggttatttagtgggttttaaatttgagaaagattgtttgtatgagagatagatagggggagatttagggtatagaaggaggttttgtgataatggaggtagaggttgagtggtgtggttatgagttaaggaatgttaagggttttgggagttgttagaagttgttagaggtgagaagtaggtttttttttggagtttttggaaagaattaggtttgttgatgttgtgattttggatttttggtttttagaatggtgagagaagaaatgtttggtgttttgagttatttagtttgtggtatttggtgatggtagttttaggaaattattatagggattagagtttttatggggttgggtaggaagtgggtgtagagtgtgttaggttaggttttttattttggagatggaaaagtagagttggagaggttgagattggataggtattgagtgtttaggggtaagaatttttaggggatggtagaggttattggggatagtatagtgagggataggagggaggggtgagggttgaggtattgttttttaggaggttttggttttttgtttattgatgatttaggaattttgtaagaggagttgggttttattttgtgttgtattgtattagatggattttggtggggatagatgtttagtgatagtgtggttaagttttttttaggattttgggtttgtatttatgattatgtatagatggttattttttttgtttgtagtttttttttgtggtttgtttttagttttttagtttaatagagttttttagtggaaagttttttttttggagattttttttttgttgaaatataagtttttggaataagataaaattgtttaatttgtaaaagttataaagttgttttagaataaaaaaaaagttttgatttttggttggaaggagtggttttttatgttttagtggttagttattattttatgatttatgttggttttgttgataaattttttagtatttttttaggggaaggttatagtttttagggagggtgggagagtatttaggtttttgtttataaattagattggagttagatattgttgagggagggataagagggtaggttttggggtttttaagttttttttggggttggtagattattgtggatttattagggtaggattatttttttttataaattttttttgggtagttgtagggtagtttgagttggatatgttttatatgttagtttagtggggtatgaggtatttatagttatgtttggaagttagtgggttggtatttgttgggtaggtttttgttatataggtatagtgttttttttatggtttttttttaggttagagtatgtttggggattagagtagtttttgtagtggtttgtagtttgataatgtggtgtgagttatgttttgtagagaagaagagttttttagtgagggaagaggtgtttataaaatttaggatatgtgtagaaatttgtaggaggtgggggtgttgtttaggggttgtgttgtttttattttttattttgtagatgatggaattgtggtttagagttgttaagtggtttgtttaaggttatttagtagggataggaaggaagttatttttttagggattgtgtgggagtttagtgataattaaagattagtgttaaagtttgtttaggatgagaattttattaagggaaatagttttgggattgttgtgtttatttggaaggtagttagtttataattgagtttttaaaaatgtatgtttttttatatgaaaatatatttgaatgggattttgtagaaagtattttttattaaggtatagtttgaggggaggtttttgttttatttttggttgtgttgtttttagttaagggtagtagggattagagtggtttttggggtatagtattggttgtttttaaagagtgttttgtttagtttatgaaaagtttgtgttttgtgagtttgggagggtgttattatttttagttttttagggagtattatttttaaatttatgtttttttgtttagtttttagattttttgttggttatttatttgggttttggttagattatttataaagtgaaggttgaatttgaggttttttgaggtttttgttagttaggtgggtggagtgatgtttttttggggttggtggtttaggaggtaggggatttattgtggtttgtttaggttgtttggtggggtggttattttgaggatggttttattgtgtaagtttgatgaaggttttttttagtgttttttgttttgtggtttttgttgggtggagagtaggatgttgggttttatatttatttgttttagtgggtttgagtttttgagtttaaatagataagatgtagttttattgttatttaagttttttgttgttttttttggtttttttttgaggtttgtttgttgtgtttgattgggtgtgtttagtggtataatatatatttgttttattagttttaatgtgataattaagatgtggttttgaggttgggtgttgtggtttatgtttgtaattttagtattttgggaggttgaggtgggtggattatgagattaggagattgagattattttggttgatatggtgaaattttatttttattaaaaatataaaaaaatatggtgggtgtttatagttttagttgtttgggaggttgaggtaggagaatggtatgaattagggaggtggagtttgtagtgagttgagattgtgttattgtattttagtttgggtaatagagttagattttgttttaaagaaaaaaaaaaaaaaagatgtggttttgggagtagtggtggaggggattatatgttttagagaggagttattgagatgggttttttttttttaggttttttagggattttttaatatatatatagtggtaattaatagattagggtttaaggtatgtaggggttgatatttttagtgattttttgttttatggtttgtaggttattttagaatatttaaagtttggagtttggtttagttattttatgttttttagtgttgggtttagagggtggtatgagtggtagaaattgttattattgttaattattgatgatggtgttggttatgtgagatggtagttatggtattgtatgtgagtgaagggattaaggaggttgggtttgggagggagggtttggaaagttggggtgaattaaaggtaggggagttttttttttttttatttgtttgtttatgttttgatgggtttgtgtttgtggtaagggggttgttagtgtgaatggatatatgtatatatatgtatatatatgtgtatatatatgttaggtttttttgagtgttgggagtttttttttttataattaattgttaggaaggtatagaaatgttattttaggtaggagattgaggtagttttgaagatagattttggttggaagtaaaaaataaattatatagtggataaattaattattagttaggtttaagtgttgttgttttagatttgagttaggggggtaggttttttatatttttttaaggttttggtgttaatagttttagtattgatagtggttatgatatgtaagaatggtatattggaaaatgaaagggaagtagttaggagagaggagagttgagtttaaataaaagttagatttaggagagtttagtttttgagatggagtttattttatgagtttggaattgttaaaaagaaaagaaatatttttgtgaaaaatgagtaaaagtgttttttgtatgtttatttttttaggtataaataaagttttgagtttagggtagtggggggtggttgatggggagggggttgtttgtgtatttgagatttggtttttttttatttttatggatatatttagtagtggtgggagttttggtgttttgtttagaggtggtttttttttttttatttttgttgtttttttttttttagttttttttttttttttttttttttttaaaaatattttttgtttggtttaatttttttaatttgttgtaattatgaatgtatttgaattattatatttttatgtgttgattatatgtttgtgttttaaattgaagtagtattgtttttttaaaatgggaggaaaaagggagtaaaggagagaaatttaaaaataggaggtaggagagagggtttgaagtgggttttgaggagtttggtagattattgggtttgtttgtgagagttttagagttttggttgtttggtttggttggtggttgtagaggttttgagtgtggtttttggtagttttttttttttattttttttagtttttgttgttttgaggtttgttgtttttttttaatatttatttggagatgtttaatttagatttttggaaattaatttatagagttaaatttttgatgatttttaaagttttttattttttttgttttgtgatgttatgatttttttgggtttaagggtttaaaaagtttagtttttgtgtgtttgttttgtttttttttgttttgggttggttttagtttttttttattttgtattttaatgtggttgggtaggaggaatggttgtgttttaggttagtgtgttgagaaaaggttttggagtatttgtttaggaggaattttgagaagttatttttttttgttttattagtttgtagtgatagaggtagttgttgtttttgtttaggtagagagggtgaatgggatggggattttttggaagatttttattatatatgtatgagttagtgagtttttagttgttttttgggagggagtgagtttttttttttgggaatttggggttttattgggggattagtgttgttttttattgtttatttggggtttttagaggttgtttatttatttggggggtttttattagtatatggttagggtttatgttgaggttaagggtttagtagagtaggtgggggtttataatgtgggtttttggggtgggaattaggggtattttttttgtttttaagttttattttaagggtttatttaaatttgagatatggaggttggttttgttggtttaagtttgtttaaagagaatgtgtgtttgtgttaaggttgagaatttaggtaatttttttgaaaattttagattgttagtttttgttgagaaagggaggatgtgtggttgtattatggaagtttttttgtttggttgtatagggttggtataagatagttttgttttttagataaaatattttttagtttgtgttgttttttaaggtttttaataaatttataatatttgtatttttttattttgatatattttgtaggtttttgagtttataatttttgttttatagagttaggtgagttatttgtgattaggtgaggtttatgtatagtttttggttagatgatagagttaaaggttttgaagtgttattttaggttatagttttgtttgttttttgtttgggataggattttaaatgtaatttttttggtagaaaggatatttttttggggggtggggaggattatttttagttttttgggagatattaagtaattatttttttttaaagagtttggaggatagttttataggtagttagatagtgagggaggtggggatagtattttagttgaggtgggaggttggggaggaagggagggattatagttatgagagaaggttgaataatggttttagggatagtatgttttaatttttagatttgtaaatgggattttgtttggaataagagtttttgtatttgtgatttagttgtagattttgttgtggtgagagtattttggatggtttaggtggtttttaaaggtagttttggtgtttatataagatgggggtagagggagatttgatatagatagggatggttaagtggagatggggtttggagagatttgtagatgttggtgttgaaggtaagggttatgtagttataagttaagggatatttatagttattagaggtttaaaggggtaggtgatgaaggtagtggtttttaatttttttggtatttgggattggttttagggaagataatttttttatagattagggagtggggagatggttttgagatgatttaagtgtattatatttattattttattttattttattttattgagatagagttttgttttgttatttaggttggagtatagtggtattattttagtttattgtaatttttgttatttgggtttaagtaatttttttgttttagttttttaagaagttgggattatagatgtttgttattgtgtttggttaatttttgtatttttagtagaaatggggttttattatattggttaggttgattttgaatttttgattttgtgatttgttagttttggttttttaaagtgttgggattataggtataagttattgtgtttggtttttattttttattttttgagatagagttttattttgggattataggtgtgagttattgtatttggttataagtatgttgtattgattgtgtattttatttttattattattataatatataatgagataattatataatttattataatgtagaattagttggagttttgagtttatttttttgtaattagatggttttatttggtggtgatgggagatggtgatagattattaggtattagatttttataagaagtatgtaatttagattttttatatgtgttgtttataatatggtttatttttttataagaatttaatgttatggttgattagataggaggtagagtttgggtagtaatgtgagtaatggggagtgattgtaaatatagatgaagttttgtttgtttgttagttatttattttttgttgtgtaggttagtttttaataggatatatggggttgggaatttttgttttagagtttttagagggttatgtttagtggatattttgattttagtttggtgattttgattttggatgtgtggtttgtagagttgtgagaggatggttgggtgttgttgtgatttagttagtttgtggttatttgttatagtagttgtaggaaattgatgtagtgttatagatggagttagggtttagtttattggagttgttttttgttattttatttttttttaaaatattgtgttaagttaattattaataattattgattttgatgggtaggaattgtagaggttttttggtttgtttttttaattttttttttaattttgaaataatattttttgttggtttttttgattataaatgtaatatttttttttgtattgagtttagaaataagagaaaaagtaaaaagtagaaattttagttgggtaaggtggtatgtgtttgtaattttagtattttgggaggttgtggtggaaggattgtttgaagttaggagtttgaggttgttgtgagttataattgtattattgtattttggttgggtaaaaagagtgagattttgttttaaattaaaaaaaaaaaaaaagaagaggaagaaaatttattaattttatttgagattttttatatgaatttttgttgtggggtagggaagtttaggaaggttttatgaggttttgatttagtttggttggtggtgggaatttgggaatagttttgagtgaggggttgggttatgattgagtttatttatttagttattttttgtatgttgtgtatattatgggtttgatggttagggttggagtatttgttgagtatagttttgatttttagttttatttagtatggtttggtttgaggtttattttttttttgtgtttgaaaatttaaatattttggtttaggtgggggattatttgaaatggaaaatttggtagtattgattggttttgaagaggtaggagttagttatgagttggttgggaggtgagtgtagaggtggtgaggtaaggttagtagagggtgggggaggtgagggttaattttttattgtgtatggtgtaagtattaagggggtattttattaggttagtgtagatttaggtttttgtggtggattttttgtggtttttttttttagaggaatattgaagaggtttttgtggttttgttttagatttagaggtatatttgtatattaaatgtattgagtaattttatagtgagggagttgggtttggtttaatttatttttttttaaattggattaaaggttgttgttttaggaaggtagggtttttaggtttatggttttgggaaattttggttgtgttagtttatgagtttagtttttagttattttagtttgtttatattttggagtgggtattgttatttaaaagttttttttagatagtttttagggtggtatttttgttttttattttttatagatttttggttatttttttgtgatattagtattattggtttatagttttttttaattgtaaagtggggtttagtggtataggttgggtttggtagggtgggaaggaagagtgaaggttattttgtttttaatagtattggttgggttttggaaaggttggaatttatagataggaaggaagtgttatatttatttaatttgttttgtgttagttagggggtattttgtagaaagaagttaggtggttgtggttgggtgtagtggtttatgtttgtaattttagtattttgggaggttgaggtaggtggattataaggttaggggttttagattagtttgattaatatggtgaaattttgtttttattaaaaatataaaaattagttgggtatggtggtgtatgtttgtaattttagttatttagaaggttgaggtaggagaattgtttgaatttgggaggtggaggttgtagtgagtttagattatgttattgtattttagtttgggtgatagtgtgagattttattttaaaaaaaaaaaaaagaagttaggtggttattttttagtttttggtttggtttaggaattgttttttttttaagatgttattaaatgttttttttattaggaagttttttttggttgttttttttatttttgtttttgttttagaatatggtttggtttttatggataattttgatattagagtttaatagagatttttttttttatggaaatttatattttaaattgaatatgtgtgtaggataagtttttgtttttatgtgaaataaaagtgaaaggtgtggattatttgtttttttttatttttttttataataatttgggttttataggggtttagtaggagttaggtttagtttagttgttttaggtgtattattttgggtattagtgtttttgtttttttttatgaagtatagttttattttttggtatttagtggggaggggatatatattaggtattttttagggtggattgtgttttttatattaggttaggaggttttggggttggtttagttatttagaaaagggagtaggtggtttaggtgatattgatgtgggtagtaggggtttttgggaaagggtttttgtaggattggttttattttgttttaggagtatatattggggaagggtgttgtgtggaggtggagagaatgtatttttggttgaaagtatgttttttgatgttttgggtttggatttgttgttattttttatgtttttttatttaatatatgttttagtaaattttttatgttgatgagtgttaagttatagaggatgtataattttttgttttaaaaagtgattttttttgttgggtgtggtggtttatatttgtaattttaatattttgggaggttaaagtgggaggattatttgaggttaagagtttaagattagtttgggtaatatagagaaattttatttttataaaaaaaaaaaaaaaaaaaaaaagtttaggtatagtggtttatgtttgtaattttagttatttgggaggttgaggtaggagaattatttgaatttgggaggtagagattgtagtgagttaagattatgttattgtattttagtttgggtaatagagtaagattttattttaaaaaaaaaaaaaatttttttttttgaaatagggttttattttttttgtttaggttggaggatagtgatgtgattataatttattgtagttttagttttttgggtagttggaattatagggttgtattattatgtttagttaattttttgtatttttagttaagatggggttttgttatgttgtttaggttggtttggagtatttgagtttaagtgatttttttattttggttttaaaagtattgggattataggtatgggttattatgtttagtttgaaaatattttttttaagaattagttagttatggtggtgtataattgtagttttagttatttaggaggttaaggtaggaggattttttgagtttggtaggttgaggttgtagtgagttataattgtgttattgtattttagtttgggggatagagaaagattttgtttagaaagaaaaaagaaaaaaaaaagatttttttatttattttttgtttatttttagatttaattattgaagtttgtttttttgaattaaaaatgaaggagttttgttttggatttttttttgttgattttgttattgtatttgttagtagagttagttaagattttttaggttggttttagtttggtttgtttatagttttttaagtaagatggatttttaggttgaggttagttgtatttttttttggaatttttttttattttttattgtgttttagattttggttgtttttaaataaatataatttagttatttttgtttttggggttgttgtagggtttattggtgtaaattgtttgggtaggtttgttgttttaggagtttttttaggttagtgtggaaggaaattaagataatggggagaagtagtttggttgggtttaattttatttttatatgtttgtgtttagttaattatttgggttgtagtttgataggagttggagttggtgttttatttttagagggggtttttgattgtttttgtagagtgagggaggtttgggggtgtagaggttaagggtttttgtagagtttgttttaggttttttgagtttaagtttttttgtagttaatggaagatttttttgagagtgggtgttttttattttgtttgtttagtaggtgtttagtaattgtttattggataaataatgaatttgtggatttaatgtgaagatgatttaaattagtgtttttttatagaattttttgtaatgatgttaatgttttgtatttgttgtagttaatatggtagttatatgtggtagtgaatgtttgtaatgtggaagggttattaaggtaaagagttttgtatttatgttataatttaaatttaaatagttataaatgtttagtgtgtgttttgttatatagattttttttgttattttttttttttttttagagatattgtatttgttattaattttttatttgggaggtaaatggagaaatgttattttttagttaatgtaaaagaaggttaatatttgtattttaagttagttttttgggtaatttttttaagtattttttattaaggttagtttagtaatattttttgattgtttgttatgtattaggaaagtattttgttgtggttttggtttgaggttatggaggatatagaaataattaaggttaagttgatagaaggggtgtgataagatggtttaaagttattgagttagttaggaggtttaggagtatggaagttttgttttttagaggataagtggtaatttatttagggggggtttgagtatttagagttaggagtgtagaagtagggggttttaggttggaaagtggtattagggttaggttgggtggtagtatgaatttatttttgaggttttgggggtggaaattaagggttttatgagtaagaagatttggtttaggtttaatggaaatgattgggtggagggattttattatttggtttttagtatatagggagggaagtggtaattgttttttaaatgttggttgtggaggggaaggagttatagtagggtaggggtggggaggatggtatttgttggtttaaggagggatgatggaggtttaattaagatatgattgtgattggggtagtttgtttaagggttagtatgtagagggtgagttgatgagattttggtagtttgttgagatttgggggtgttggggaggtagaggttaaggttaattttgagattttttgtttgtaaatttgggtgggtggtaaggttgatattagagaaatagaggaagagtgggtagttatgggtgagagaggaagtaatgaattaggggtgtttgtaagagtttaggggtaaggtttttgggtagttaagatgttggtggttttttttatgattagttttttttatgtggtatatttttgtttgtatggttgggtatggggtatttgtttgtttgatatattttgagtagttattttgtgtattgaggtaatgtggtatggtgttttggggaaatagtgaggaggtattgtataggttttatttttttggtattttttgttttttggggatggtggtagttaaataagtgatagttaattgttaggagagtttggttttgatttattaggtggagttaggtatttttgttggaagaggtatgggaattagtataggatgaagggaggtagtgagtattagtttaggttttgtttttatagggttttttttttatatttatttgtgtaggtgttttttgtgagggtagagatatttgtagtgtttgagggagattttttgtgggtggggttgtttatttatagtggttaggtgggaggtgtattagtgttttgtggttgttataatggattatagttgtggggtttgaaaaaatggaagtgggtttttttttatgttggaggttagaggtttaaaattaaggtgttagtaaggttatattttttagggaggttttggggtggggtggggggggggtttttttttgtttttttttagatgttttttggtttggggttgtgttattttattatttgtttttgtttttatgtggttttttttggtgtgtttgtggtttttttgttttttttaaggatattagttgttggatttagggtttattttaatttagaatgattttattttaagatttttaattatttatatttgtaaagattttatttttaatttttaggttatattttgaggtttttggtggatatgagtttgtgggggatatggtttaatttaggatagaagggatgatgggggtattggggaaaaggttatatattttagaggtattggaagatggaagagtaggatttagtgatatgggatgttaggtagaggagttggttttaaggattttagttggggtttgagggttagagggagggaagtttaggtattattgagatgaaatgttttgtgtattgtgggaaatagggtaaaagtttgttggatgtttagttagagaggtggttgtttgaggtatagaaaatgagtgaatatgggagagtttattagaaggttatttgggagggtgtggtggtaatatttagaagggttgagaagtgtatttttatagtttagttaaatttatttggggaaatatatgtttttggtagtattagtaatagagaagatttttggtgatgttattagtgggttatgggatgggtaaattttgtttttttatatagaggaatatttgttagttgttaaaataagtgaattaaggttttgtggatttatatggataagtttttatgttgttatgttgtgggtataggtagggtagttattgattttagtgaggtattaaggatgtgatgttgatgatggtatttaagaggagatagatttaggttgtttagttatatgatgttgatgattgtatgtaagaggagattaggttggatgtggtggtttatatttataattttagtattttgggaggttaaggtaggtggattatttgaggttaggggtatgagattagtttgattaatatggtgaaattttgtgtttattaaaaatataaaaaaaattagttagatatggtggtgggtgtttgtaattttggttattgaggaggttgaggtagaagaattgtttgaatttaggaggtagaggttgtagtgagttgagatggtgttattgtattttagtttgggtgatagagtgagattttattttaaaaaaaaaaaaaaggagatttaggttttttagatatattattgtttagtatagatgtgtttgtttggggttagattttaatttagaggggtgggtattgtagtaggagtggggttaggatggagaaggttatttagggttgtggttatatttgtaatgttttattttttaagtgggatggtgagtatataggtgttttattattttattttttatatttttgttttgtagttttaagaattttattttttttttaaaaggaaagaaagtgtgtgagttgattaaagtgttgattatggtgttatttaagtttttgttagaaatgttatttttggtttagttttaaatataattttgagaagagtttttgtttttttggggagggtaagagttttagatataggagattggttagatgtggatttatagagaagttgggttgggaggatgggatggtagatagttgtttggggagtgttaaatggggaggttggagatgttggggtgtttaggaatgaatttttgtttggattagggttttagtaaaagggaggtagggagaaagaaagaagttaagaagatgaggaaagggtgttttgggttagagtttatagaggtttatagagggaggattttgtgtgttagtaggtagttttatgtaaatttagattattagtttgtagttttgggatttagtaaattatgttttaggtttttaagttgagttgtgattgtggttgttaagtgttgatagtatagaattagttagtttgagtagagggaagtaattgttgggggaggttgtgtttatgtagtttagggtgttaggtttttaagatgtaatttttataagaattgggggattttttttatttattttattagaagttggttaatgagagggaaggagatggagaggtagattagatgtggagttggagaaaagttttttagaaatatagtagtggttgggttgtttagtggttagtgtttaatatgattgtgatgggtggagttttttttaattatagtgttgaattatgtagttgtttaggggtttttagttagagtattatttttttttttttatatatagttttattttgtattgtaaggggttttatatgtatttaatgtggatatggtattttttttatttttattttttgtaaaaagttattttttttattgtttaggtttggtggtgtatagtttatgggtattgtatttatttttggaaggtagatttaggaggtgtttgtgttgtttttatagaagtaagtttaggattagaagtaggttttgggtttagaattttgaggttttaggtgttagtgtggtttggaattgtttagttttatagttattagttatatgtagatataagtggaaatttatttaaaataaataaataattttatgtaagtaaatgagtgaataaagtaaatgtaaatatttatattttgagtgtgtaatagatttaggtggttaagtggttattatataggatggtggagtgtagatgtatagaatagatttattattatagaaggttttattagatggagttggtttagagtatggaggtggtggttttagatgggtatatgtttttgtttttgtaggtgttttgttttggtaggatggttgttttattttgttttgaaggtagttttggtttataggtgttttatttgtgtggatttgattttgggtttgtgttttttggtaattttgttttttttagaatggttaatttatgaaggtatagtttttgtttgtttgttattatgatggtagttaggggtttggtatttagttggtttttagtatatatgtataggtgattatgttatttttgttttttttagagttttttgttttttaggggaggtaagtttatttattgttgtgatttattattttttttaaatagaaaagttattagatgggtatttgttttagtttggttgttggaagtgatagttaagaataatgtaggtttttagaaatagaggtattagtatggttatattggggttaggtaggggagattagggatatttagtggggagaagatgatgtgtagatttagttttggggggtaagggttggaggtagagttttgatttttttgttttatttttttgtttaggttgtatttagtgttggtagagtttttttaagtttataagttgtaatttgtgttttggatggttagttttagagttttgatgggtgtatttgttttttttttttattggttagtgtggaaaatttttaaatatatggaaaaagtataaggagtagtatagtgattattgttagaggtttatttatttttttttagataatattggatgtatttgttttattttggagtattttttattttgtaaggttgtagggagtttatagatattgaattaatattgagaggtttatggttaaagttatttgtttatggtatatttgtttttttagtattttaaattaaattatttagttttatttattttttgtttttttttttgttttgtatatatgggtttgttttttgagtttgggggtggttgtttttgtttttataaggattatttttagtagggtagtgttgataggtttggaagttatttgagtttaaagttgttaaagattgtgtttttttgggaaatgggtaagtggttttatttatttagggaagttaggtggggaggtaggttttagattagaatgaagggattttagtataaatatatttatgagttgggtggggttagagtggagtgagttatttatttgggttattggagttattaagtttttggagttggttattggaggtttgtgtgttttttaaagatagagataaagggtaaaggttatataaggttattggtgttttttttttgggtggatgattaatattaggaatgtttttgtttttgtttttgttgtgagttttagagttagaaatggggtttatttggggatagaggttttatttttttaggtaattttggatgttggagggatgatagttattgttgtttggttgttggaggggttttgggttaaatttttatatatatttttttttaagttttattatttttgttttgtagataaggaatttgagtttttatagagtgttatttttttgtggttatatagtgaatgagagttgtatataggtgagtttatgtttattagattttaagttgggttgtatttaagtgtgtttttgttggatggagtttttttttttttttatgtttatttgttttatgaattagggtttttttatattagggtttataatttatgggtagttttgatttagttttttttatttttagggttgggtgtagttgggttggatttggggatggagtgggataggttatttttattttttgttttaggagggaataaaaatagaattttagattaatgtagttttttgtggtatgtgttttttttgtttatatataggttttggtttggggttgtttgttggagaggtttatggtaggtaagttttaatttgaggagatttgttgaggtgttaagttaagtaaatttgaaaggttgttaggaggagtggttttgggagtataggtggttattttattgttgtagagtatggtattttggggatgttttttgggtaatgttatatagttattttttagagagttttagggatatataattagtttagttttattaatagtgagataagggattaggtagatttagatatttttttgtatttgattattatgttggttgttggttaaagatgttagtttttttttggaattttttagaaaggtttttgtagtatttatttatttatttatttatttatttattttatttatttatttatttatttatttatttatggattttatttattttattatttttttatatatttatttatttatttatttaatttatttatttagttttttatttatttatttatttattaatttatttatttgtttatttaatttatttatttattaatttatttatttattatttatttatttatttatttatttatttatttttttatttatttatttatttttttttttatttattttataattttatttttaaattgtgattagatggaaatgggtgtagttagtttgtttttaaaggtttagagtggaggtagagtgaattgtttatttggtttttgtgtttagtagtttaggtttgtatatatgttttataattataggatattagatttagtaattggtagtagaatgagtatagtgtattttttgtggaattagtattgatagggtatttatttttattaagtttgagtttttttggtgttggagggaatttttagatgggttttaattttagttgaatttattttttagggaaagtaatattgtgagaaatgtgtgtgatataaggttttaaagagggtgtgggttgtgatttttggagtaattagggaggttttatggaggagatgaggataaagttgagttttgaaggagggattggaggatgttgagtagggatatttatttttgtttgtgagggtttgatggtaggttgtgagttgtattttagttttgatttatttaatttataattttagtaggtaggtgtttttgttttattttatagaggaggaagtgaggtttagggttgggtaaattgtttaaggttgtatagttgtggaatttatttttagtatttttagtttgttttagttatgtttgtgattttatttagtattttttttttggtgtttatttattttgtttattgttaagtaataaaaattttattaggaaaatttaggggtttttggttagtttttttagatagaaaggtagattttggtgtagatttttaggaagtaaggatggaagggttagtatttgttttttagaaatgatagtttttttaagattaggagagatggtttagagtgtagttttggtgggttgtttaggattaggaggggagaggagtggggaggaggatgaattttatttttaaggttgttgagtggtatatagtgagtttggattttttagttttagttgagtttatttttatgatggttatgagtattttttttatatatttgattggaagttgtattgtatataatgtatatggggttattattttttgttttatatatttttatgtatatattattagtgtattattgggatattttgttgtttggggttgagagtgaattagaattttgtttataaatttagtatattttattgtggaaataatggggggtaaggaggggttgtttagtaaagaataggatatatgtttttgaggatggagttatttttggttgagatatttttgtaggggatgttggtgataaaggttgttttatttttttttttgggttagatggatattatttttgttttttgttttttagtattaggtaaaaggaaaatagaagaggttttatttaggttaaatattttagggttttttatttgtaggaaatatgttggtttattttttttaaatttagtatgggggtggagaaatggtggggaaaatagtatttgttttagattttttgggtggagtttttgttttatttatattgtttatttttttgattttttaaaatgggtatttggtgtttggtagtttttggtatagagaagatgtaaagtaaattgtttataagaagggggtgagtgtagtttgagtattttttgtttttgaataaattgttaggtttagtgtagttgttgttgttattgttgtttttaggaagggatttttggttatgagtggttttagtttagttttttggatttaattatttaggtttgtgtttgagtttagtaaagaggtagttagaaaagtttttaagatatttaatgattttgtggttttagttgagaagtgagttatttttatgtgattttaaaataaaatatatttagaaggagagaagataattgaaatttagttgtttggagttattttagatgaaagtatttgagtttttgggaggtaaaggaggtaggaaagtttggagttagatgattagaatttgaatgtagattttgttaggtttttgttgtgggttttgggagatgatttttattttttgagttttagtttttttggggatagagatggtgtttatttataggttgttttgagttaatgaggttatatggtgtaagtattagtatagtgtttggtataaaattaaaatttaataagtgatattattattattattattattattattatttttgagatggagttttgttttgttatttaggttggattgtagtggtatgattttagtttattgtaatttttgttttttaagtagttgagattataggtatttgttattatgttttggttaatttttgtatatttggtagagatagggttttattatgttggttaggttggttttgaattgattttaggtgatttgtttgttttagttttttaaagtgtttggattataggtgttagttattgttatttggttgtgatattattataatattaatattataatagttggttaggtatggtgatttatgtttgtaattttagtaatttgggaggttgatgtgggttagttatttgaggttagtttgagattagtttgattaatatagggaaattttatttttattaaaaatataaaaattagttgggtgtggtggtatttgtttgtaattttagttatttgggaggttaaggtaggagaattgtttgaatttaggagatggaggttgtagtgagttgagattatattattgtattttagtttgggtgatagagtaagattttgttttaaaaaataataataataaataaataaaatatattttgatgagatatggtaaaagatagtagaaggtaggagtttggggatttattatgggttggtgttttaagtagaaagaaatgtagtgtttataagttagagagtagatgttgaagataggagatgagtggggttttttggttttggagaggaaagggtgagtttaggtagaaagagtaaatttagggtgttttgtgtagtgttttttttgtggaattagtttagggtattagtagtatagtttttttttagtagtggagattaggttaattgtttagtgttttttttgtttttttgttttaattttattaagtatagtttttttttgggtatagtagttttgtaggggtggatattgatttatgtatttaggagtttagaggtttttttttttttatttatttatttagagatggagtttttttttgttgtttaggttggagtgtagtggtattaatttggtttattgtaatttttattttttaggtttaagtgatttttttgttttaattttttgtgtagttgggattataagtatgtattattatgtttggttaatttttgtatttttagtagagatggggttttattatgttggttaggttggttttgaatttttgattttgtgatttttttattttggttttttaaagtgttgggattatagatgtgagttattatgtttggttaggggttttttttaatggattttttttaatgtatataatttggggaatttagatataagaaagatatagagtatgaaggttttttattggtttgtttatttttagaggtggggttttaggtggtttaggttggttttaaatttttggttttaagtaatttttttgttttggttttatgttgggattataggtataagttattatgtttagttatttttttttttatttgggttgttatgttagaatttggtaagttataagatggaaatgtttaaataggtatttagaatttgagtagatattatttgatgtattattgttgttattttaatgattgaaatgtatttattatatttgtttttttaaaggttattttagatttttatagattttatttgtgatgtaagatagttattttaaatttttttgtgggtttgaatagattagatttttgaatttttgggtagagtagggatggggttgttttagaggagggtgatattgttatatttttgttttgtttttgtgttgataatgaatgaggtttggatagttttttttttattaaaagttatatttttttaaaaaggagttttttaggatgaggtgttatgataatttaattgtgtataaatatttatttttaataatgatagaagttatttatagaaaagaatttatttttggttgggtatggtggtttaggtttgtaattttagtattttgagaggttaaggtaggtaaattatttgaggtttggagtttgagattagtttgattaatatggtgaaattttgtttttaatgaaaatataaaattagtttgtatgtttgtaattttagttatttaggaagttgaggtagaagaagtatttgagtttgagaggtggaggttgtagtgagttgagattgtgttattgtattttagtttgggtgatagagtgaaatttttttttaaaatatatatatatatatatatatatatatatatatatatatatataaatttatttttatttttttttttgaaatttttgagagaggttaggtgtagtggtttatatttgtaattttagtagtttgggaggttgaggtgggaggatggtttgaggttaggagttggagattagtttgggtaatatagtaagattttatttttattaaaaaataataaaagtttaaaaagtttttgagatagtttttggggaaaggtgggttatggagatttttattttggttatttgtgttttttttgtttgtttttttgtggtttttttttattttgagtttggggtgggggtggtttgagtttaggatgggggtggtttgagtttggggtgggagtggtttgagtttgggatagggtggtttgagttggggtgggggtgttttaagtttgggttgtgggtattttgagtttggggtggggatgttttgagtttggggtgggggtgttttgagtttgggttgagggtggtttgagtttgtgttgggggtggtttgagttgggatgggggtggtttgagttgggatgggggtggtttgagtttggggtgggggtgttttgagtttgggatgggggtattttgagtttgggatgggggtgttttgagttgggatgggggtgttttgagtttgggatgggggtggtttgagttgggatgggggtggtttgagtttggggtgggggtggtttgagtttggggtgggggtgtttaggatgtataggttttattttttttttttgaggtttagtttgtttataggagttgtgaagggttggattaaagttaaaggtttaaattttagatttatttttagatttagtggataattaaaatatttaagtttatttttaaaggaagttgagataaggagataatggttattttttttttttttttttttttgtttttggtttttgttatttggagttgtgttttgaagaggtatattgggtattaggtttttttggttttgtttttattttttgtttagatatagaataatttttttttatttttaaggttgatatgtggggttgtggattaaagttaatttatttatttatgaggggagtaatttttttgttttaggaatttgtttttataggagaataaatattgtagaaggtattgtttttagtggtggtgtatgtttgtaattttagttatttaggaggttgaggtagaagaattgttagaatttaggaggtggaggttgtagtgagttaatattatgttattgtattttaatttgggtgaaaagattaagattttgttttaaaataaaaaaagaatagtattttgtgttaaggttaggggttttagttattttttttgtgaagtggaaggggtattattagtttttgtgagaaggaaatagtttatttaattataaaatgttaattaaaggaggtagtatattggttttggtgtggtgttgttggtttttgtttggggtaggaggagggttgggggagagttaaaagttaaagaaggtttatggaggttgttttttttttggtgattagttttttttttgatggtaagttgttaatagtatttggtttttaggttggggaaggtgagattagtttatatttgtttagggttttgttttgtttgtatgggtagtaggtgtttattttgttagatggttttgtttattatagggtattagtgttagttaaggatttatagagtttttttgtaaaggtttattagtgggtattgggattttgggttttatttatatagggtttttatataaaatataggatgtttagttaaatttggattttagataaataattaataattttttgaagagataaggattttgttgttttatttaagttggagtttagtggtatgattatggtttattgtaattttgaatttttggatttaagtaattttttaattgtagttttttaaagtattgggattgtaggtatgagttattaaggttagtaaataatgaattatttttaggtataagtatattttaagtttgttgtgggatatgtttatattaaaaattaatttttgtttatttgaaatttaaattgaatttattgttgggggagataatggagtgatggattgatagaggagtatagagatagtttttttaaatttttagttgattaaagtttggtttttagtttttttgggtttttagagatgtattaagggtggaagtgattaggagggagataaaaatattgaagtttgagtgttagtattgagttgtgtggttttggataggattgttttttttttgagttttagttttatatgttataattggttaataatagttataaagtatttgaagttaatggttgggagtttgttttaggaggtaggtattattaggatgtagagagagtgaggagtttttaaagttagtttaggttaggtatagtagtttatgtttgtaattttagtattttgagaggttgaggtgagagaattatttgagtttagaagtttaaggttgtagtgagttgtaattgtattgttgtattttaggttgaatgatagagtttttgtttttaaaataaaataaaataaaataaaataaaataataaagttagtttgtgtattggattgtatgttgttttaaagtatttaaagtgagagaggttaggaagtaatgagatgtagaaaggtagggggaggaggtttagaggtattagagaagatagttgatttttatttttatatatttttggggtattttgagttttatttatatatttaggtgagaatttttgtatttgtgaaagtaatttgaggttgagagaattaataggaaattgttttattttttatgtagggtttttttataaataaggttgagttgtagtttattattgtagttgagttttttgtagtagttgtggtggggaaggttttttaggaggtttgagtaatttagaaatatttatagtatattttttagtttttttagaggtttttgttgagatgaaagtgttttggtttgtggttaaagagtttagtatattgggtagttatagtttttattatattgatttggttattaggtttttatgaatttagtgaggggagatgggttttttagggaagtttgttgatttttttatattgttgtaaatgtaaagtttggtgattttattatttttagtaattgtgatgtagtaataataagaatagttatgtttattgtttattgaaggtatatgatgagttagatattgtgttggtatatgtgatttttggaggtaatatatttttttttaaggaggaaatgattgagttttggagggagggttttttatttggttttaggtttttttttgatttgtgtttttttttttttttttgtttgttttattgtagtttttttggtttttttgttgtttttggaatgtattaagtttgtttttagtttagtttttgtattgttggtttttttttgtttttttaattttaatttagttgttattatttttgtgattttttattatttattttaaagtagttattagttattttttatgtaattattttattttaatttttattatagtttttagttttattttgatagtttttagaattgatgaatttattgattttgtttttttttattgtatgtaaattttaagaaataagagtttttgtttgtttattgttgtgttttagtgtttgttatagtatttggtatgtagtaggtgtttaatgaatatatttttaaaagaatgaatgattggaaggagtttgaaagaatgatggtttgtgttaatagtttatttttaatttttttagatgggatggagattattattatgtaattatgatttttttgagtttgtgtggtggttgatggtaggtgttagtttggttggattaagggatggttggtaatgtattgtttttgggtgtgtttgtgagggtgtttttggaggagatgggtatgtgagttggtgggttgagtggtaaagatttttttttaatatggatgatattattttattgttagataataaaaaggtagagaaaaggtgaatttttttttttttttggaggtgggatgttttttttttttgtttttggatttagaatttttagttttttagtagttttttaggtttttaaatttttggttttaaattaagagttatattaatagttttttagttttgaggtttgtagatttggattgagttatgatattggtttttttgggtttttagtttgtggatggttttttgtggtatattttggtttttataatggtatgagttaatttttttaataaatttttttttatttatttattatttatttttttaattgtttatttgtttatttatttatttatttattatttattttttatttatttatttattatttatttaattaatgtatttatgtttgtttgtttattggttatttatatttatttattaattatttatttatttattatttatttgttatttatttagttatttatttatttatttatttattttttttttttttttgagatggagttttattttgttgtttaggttggagtgtagtggtgtgattttagtttattgtaatttttattttttaggtttaagtgatttttgtgttttagttttttgagtggttgggattatagatatgtattattatgtttagttaatttttttatttttagtagagatggggttttattttgttagttaggttggttttaaatttttggttttaagtgatttattggttttagtttattaatgtgttggttattataggtaagagttattgaatttaatttattatttgtttgtttgtttgtttgtttgtttgtgtttatttgtttgtttggttatttattatttatttatttatttgtttgtttgtttgtttgtttgtttgtgtttgtttgtttttatttttttgtttgtttgtttatttagttatttgtttgtttgtttgtttgtgtttgtttgtttttttttttttttgtttgtttgtttgtttatttagttatttatttatttatttattttttattggttgtttttttggagagttttggttgatgtagatggtgttttggtaagtttaggttgttatttagattattgtggagggagtgatttaaataatagatatgtattttttagtttgagaggtttaaagttttggattaaggtgttgttagggttagtttttggtgaggtttttttttttggtttgtatttatttttttgttgtgttttttgttattttttttttgtttataagtgaggggggaggagagatttttggtgtttttttttttttttataaggatattaattttattagattagggttttgttttatgattttatttaattttaattatttttttaaaagttttatttttaattatagttgtattgggagttagggttttaatgtaggaatttaaggggaagggtatagtttggtttataataaatgggaaattatgtttatgattaaattttttagaagatatggtttattagtgttgttaatgattgtaagtaaaggttagagaggaaaggggtttttgtggggtggggggtggtgggggtagttggtgttgggaataaggtttttttttttgtttaatagtagggaagtgaggttggttgtagatgttatttggggtgggaagagaggggagtttttgtttgtatattttgtgtgggttttggtttgatttttttttgtgttttttattttttgtgtttttttttgtgtgggagaaatgttgatttttgttggtttaggtgtttaggtttttaggtttgttggttttgggttgggtttaattaatgagaggtttgggaggaatttgggaggtggaagtaagggagggtgtgggagttttttattttttttgttttagatagtttttttagtaggagaggtggttttttgtgtagttttagtttttgttagagttttatttttgtttgggtttttagtaggtgattttggtttttggattttggttataggatttttttttttttatttttatttaggggtggtggtggtattttgttgttaatttttaggttatttttataatgttaagaattttttttttatttgtatggtttttttttaaggtattgagaagggttttaattatatgtttatagggttaaatattttttgtaaaatttataaaatggaaaatattttttttataattaattaatgtttttgtttatttttagttttgagtttttgtttgttatatttttttttgtgtgaggtggaaatggaggtttgttgttatgtgggggtttttgttaaggagaagttgaattggaaagatatttagtttggttttggttgggttatatttatgtagtttttatttatttttatgtatagtttagttattgtttgttattttggtgtggaaatggattttagtaatatttgttttatttattgttttaattttatttattgtgtagaattaaaaattataagatatgaatatattttgtggtgtttggtgttggaaaaatgtgtgtagtggagagaagtaagatttgaaatgtatgggtttagaagtaaatttgtggaaaattatttttattattagaggtgaagttgtaagtaaaggatttagtttttttaatgtggagttaaaatagaaaagtttttttggttagaaatatatgtataaatgttttatatgtagttagaaattttttttatttttttattttttttttgatgggaattatatttaaaaaaaaagaaaaaaataggatttattagaatttttgtgtattttgaataaaataattgtagtagtattattaattttatgttgattgttatttttgtatatattttaattattaaaaataaaaataaaatttgattaattaaggagatttatttgttttatttatttatttatttttgagatggagttttattttgttgtttaggttggagtgtaatggtatgattttggtttattgtaatttttgttttttgggtttaagttatttttttgttttagttttttaagtagttgggattataggtgtgtgttattatatttggttaattttttatgtttttggtagagatggggttttattatgttgattaggttggttttaaatttttgattttaagtgatttgtttattttaattttttatagtgttggaattataggtgtgagttattatgtttagtttatgtttttttttgttgttttttttttttttttgagatatggttttatttttttatttaggttggagtgtagtggtatgattatggtttattgtagttttgattttttgggtttaagtaatttttttattttagttttttaagtaattgggattataggtgtatgttattatgttttgttagtttttgtatttttagtagagatggggttttgttatgttgtttggattggttttgaatttttggttttaagtgatttatttgttttggttttttaaagtgttgggattataggtatgagttattgtgtttagtttgattagttttttgtttttgaaatagaaaatgatattataaagttattatattgaagaagtaatgttaaaaatgtgggagaaatagaattttggagatatgattgatagttgattggtatttttttgtatgtagtgatgtttgtgatatttaatagttgtttataatttataatttgttgttatttatttttttattttaaatgaattattgtatttatatttttagagggttgtataagtttatattattttgattttttgttgattgtttttttgttttttgtttggtttttattttttttattatttgtgtaattagttttttgtttttaagtttttttgttttaaatgtttaagtggattaggtattgtggtttttgtttgtaattttagtattttgggaggtttaggtaggaggattatataaatttaggagtataagattaatttgggtaatatagtaagattttgtttttatatatatataaaaaatataaaaattagtaaggtgtgatggtatatgtttgtagttttagtattttgggaggttgaggtaggaggattgtttgaggttgggagtttaggattagtttgggtaataaagtaagattttgtttttataaaaataaaagaaaaaattaggtaggtatatagtgtgtatttatagtttgagttatttgggaggttgagaagggaggattgtttgagtttaggagtttaaggttgttatgagttgtgattatattattgtattttagtttgtgtgatagagtgagattttgttttgggaaaaataaataaataaataaataaataaataaataaataaatgtttaagtggtttttattttttggttagattttattatatattttatgaataaattgtatgtatgagaaaggtgagtagatgaatagggtagggttagggggttaaggggaagattatagattatgtggagtgagattagtggttaaaaattgttaattatagttaggtttggtggtttatgaaggtaattttaatggttgggtttggtggtttatgtttgtaattttagtattttgggaggttgatgtgagtttattatttgaggttaagagtttgagattagtttggttaatgtagggaaattttgtttttattaaaaatattaaaattggttaggtatggtggtgggtgtttgtagttttagttatttgggaggttgaagtaggagaattggttgaatttgggaggtggaggttgtagtgagttgggattttattattgtattttagtttgggtgatagagtgagattttattttaaaaaatttaaaaaaaaaaaaataaaaaattgtagattttaataaggaagagttataggatgatattttaggatgtgggaaaaggttatgttagttttggattttttttgattaatgggtattttagttattaaaggggtagatgtgttttatttaatttttatttagttattagagtataatatagggatgtgttatagatagagatggagattaataggtagaggggtgatggggaggaagattgaggtaagaggaataaaatggggattgtagagggtaggtggtaggagtttgagggttttagaagaaattgttgtataagtaatgagttagtagggtgagtgatggttaggagaggtggtttaagaaaataaagagatatttttgggggtatagatgtgttttgaggggttgaggaagagatggggaaggggtggttttgtggatttttggtatgattgttgtggtgaaaaggaattaaagattttgataaggggatgattttttaaataaggaagttttgggtttttgtagggggattagtagattgagggtaaatggtattttgtttattaaagttttaataaaatgttaaggtaagaatatttgtttggttttgggggtaattttagaaatattagaaaagggatttattatgtgtaatttttttttaattatttggagaaatgtatggttatttaagatagagaaaggtagttaaagtaagtggaggttaggtatagtgatttatgtttgtatttttagtgttttgggaggttgaggtaggaggattgtttgaggttggaaatttagtattagtttaggtaataataaaataagattttgttgttataaaaataaaaataaaaattttttgagatggagttttattttttttgtttaggttggagtgttgtggtatgattttagtttattgtaatttttgttttttagatttaagtaatttttttgttttagttttttgagtagttgggattataggtatgtgttattatgtttagttaattttgtagttttagtagagatagggtttttttatgttggttaggttggttttgaatttttgatttttttggttttttaaagtgttaggattataggtatgagttattgtgtttggttgttataaaaattttttaaaaattagttaggtatgttaggtgtggtggtttttatttgtaattttagtattttgggaggttaaggtaggtggattatgaggttaggagtttgagattagtttgattaatatggtgaaattttgtttttattaaaaatataaaaattagttaggtgtggtggtatatgtttgtaattgtagttatttaggaggttgaggtaggagaattgttttaatttaggagttgggggttgtagtgagttgagattgtattatggtattttagtttgggtaatagagtaagattttgttttaaaaaaaaaaaaaaaaaaaaaattagttaggtatgtagtgtatatttgtagttttagttatttaggaggttgagaagggaggattaattgaaattgggaggttgagattgggaggttatgattatgttattgtattttaatttgggtaatatagtaagattttgtttaataataataataataaataatgtaagtgggtataagaatttatttatttatttatttatttatttatttatgagatagggttttattttgttgtttaggttggagtgtattggtgtaattttggtttattgtaagttttgttttttgggtttatgttatttttttgttttagttttttgagtagttgggattataggtgtttgttattgtatttagttaattttttgtatttttagtagagatggggttttattatggttttgattttttgattttgtgatttgtttgttttggttttttaaagtgttgggattataggtgtgagttattgtttttggttttaagaatttattttattttagtattttggaggttgaggtgagtggattatgaggttagaagattgagattattttggttaatatggtgaaattttgtttttattaaaaaaatataaaaaattagttgggtgtgggggtgggtgtttgtagttttagttatgtgggatgttgaggtaggagaatggtgtgaatttgggaggtggagtttgtagtgagtggagattgtgttattgtattttagtttgggtaatagagtgagattttattttaaaaaaaaaaaaaaaagaatttattttaagatagtaagttttagggttgaagttagtttttatttagttttaggtttaaagttataagtatggttattgtaatatttttatttaggatattattttttaggggtttagatttatattattaaggaggagtgtttatattagtagttggggagagggtggttttttataagatgtaatgtttattttgaagagttattatagtgataattatgaaatttatgtttgagatttaattttaagtgaaaagaatagaatttaatatttattttatggggagtataaaattttgaaaatatatgttttttataattaaattaaattttatgttatgtttttgaggagataagtattgaatggaatatagaagaaatgttatagttaatgattgttgaagttttttttttaattttttgtttatgttgtttggtaataagtaatatagaaaattgataataaaaagtaaaagagaaagaaaagatatagtgtatagtttagattgttttttttaaaaaattaaataataataataaaaagtataggttgggtgtggtggtttatgtttgtaattttagtattttgggaggttaaggtgggtggattatttgaggttgggagtttgagattagtttgattaatatggggatattttgtttgtattaaaaatataaaattagttgggtatggtgatgtaggtttgtaattttagttatttgggaggttgaggtaagagaattgtttgaatttgggaggtggaggttgtagtgagttgagattgtgtttttgtattttagtttgggtaataagagtgaaattttattttaaaaaaaaaaaaaaaaaagtataaatgtaagttgggtgtggtagtttatgtttgtaattttagtattttgggaggttggggtaggtggattatttgaggttaggagtttgaaattaatttggttaatatggtgaaattttatttttattaaaaatataaaaattagttaggtatggtggtgtgtgtttgtaattttagttatttaggaggttgaggtaggagaattgtttgaatttaggaggtagaggttgtagtgagttaagattgagttattatattttagtttgggtgatagagtgagattttgttttaaaaattaaattaaattaaattaaataaaataaaaaaaagaagtggtataatataaagttttggtagttaaagtgttaatttttagttattaggaaggttttgttatttaatgatttattgttttagttaaggttagttatattttgggtttttgatgttggaggtaatatgatgttaatattggtgagaaatttattatttttttttttttgttttttggtgttggtttttgtgtgtatttgtagtttttttattattggtgtttttatggtgtttatgttattggtttattttttagtaataatttgatagtttgatatttttgtagattttgtggttatagagttaaagttttttgttattagtgggttttgtagataattttttaaatttttttgggttgagttagttaagtttttaataagttggaagatgataggggttggatgtaatttatttttaattggtttgggttatatggatattattttttttttgggatttgatttgggatggaaataggagttatagtttatgggaaggttgtgaaaggaagttttggttttagggtgtggattaggttgatttgtggaataaggttttaggggtggtttatttgtttgttttgtttagttttttttggtaattatatttatttggggtttattttaaatttggtaggtaatgttgttgtttttattttagttgttgttttaatatgttttgtttggttaggataggtgtttaggtatggtatttagggatatttttggtttttggggtttaatttttggtttttaggtgtagtgttgggaaaagtagagggttttggttatggtgtaggttttgttataggttatttaagtagtttgggaggagttggaaagagagtaatgtatttatttggatagagattgaagttatatttttattgagaaaagatgatatttttgtttggattttttttttgaaattttaggttggggtggggtaggagttagtgagagagtttagtgttttaaaggggattttttggttttttgtgttttttaatttagtatttttggggatttatatatttagggtagagtggttatttagggttttttttatttagatataaaggttattgaaggttttgggttaatattgttttgaggatgattagtgatttgagtttttgttagagatagtaggtagtttgggtttaagggttgtttagtgatttgaagttgggattattttatattttttgtgttatttttgttttttgttttggaggtttttaggttgttaatagttatgttttggagaattaggttagattaggttgggaataaagtttagttgttatagagttgttgagaggttattggtaagtagtgtttaggagttgttttttttttgttagtaatagtttaatgtttttttttataggggttgtaaatgggtttatgtttagggtggggttagggagataaagtagagagaaattgggttgggagtagagagtgttatgttttattttggagatttaaggttaggttattttgtagagttggtgtttagagtttttagtgtataggagaggaggtaaatagaatttgatatttagtagtgtttggtagatgtttttggaatgaatgattaaatttatatggagagttgaaatgggttaggaattttagggagatgggtagtttatagtttagtagggttgttttagtagagtaggttaatgttaggttttttggtaaattttttggggtttaggtataattgttatattaggaaaggggtaggggtgattagtttattggttatgggggtattttattgtttttatagaagtttggtatttataggtttgggtgatatatgatttttatgtttggtattatgatggttgtttattaagtttttttatttattaggattgattttttttggttagtgattttagattattatgatttggtagttgttgttaggtttgtttggttaaggatttttttggagattgagttattttatatagtaaagtgagttatggggttatagtgttgtgtgttgtgtataagttttgagggttttatttagggattggtatttattgatttttataaatttttggtaattgtttagagttgggatgtttttaaggtaatagttttaataaatagaggtgtaggaatttagtgtgttattttttgttttattttaaaggtttatatttttaggggtttggagtttttttttggagttttttttattttaaagttagttggatttgtttaggaattgttattattattttttggttgggtttgtattgatgtgtattgaattttttttattaggtttattttaggtaaattttagagtttatgtaatattgtttgtggataaatattggggtggaaataggggttatttttaggttttagttatatggggttgttagggttgtttgggatggtaggagagtgttagaggagggtagtttaaggattaggtagggggtgggaagtgtttttttttatgggtttttaagtgagatgttttttgtaaatatttatttgggatttttaagtagagggttggtttttatgttatttggatttggattttagattattgtttttaagtggtaattttgggtttttttgtatttgttttggtttgagttggttatatttgtggggggtggttttaggaagaaggtggattgttgtaaatgtaatgttttgttgttaggtgtattgtttttggttattagaatttttttgggtaggttggggagatttgatgggtaagtgtttgtggtttggtgtgagtgggtagggtaggtggtttttgtttgggtatgtttttttatttttgtaatagattagggagagggttggttttaggatttaggtttagttagttgttttataattgaggggttttggtggaggatataagttagatagagttatagattaattgtatgaggtggttttttttttttagtttaggttttttgaatgtgttagagtagataagtttggatgtgaggaggtaagaggtagtgagaataggtgtggagatggggttgggggagaagaggaagaaattttgtgtttgtgttttttttatgtttgtttgttattgggttagttgattggggaagtgttttttgagggtgtaattttttgttttttttgtaagttagtttttggggtgttgggtgagggtgtagttttgtttattatggtgagttagtatattgaattatggtagaagttgttttttgtgtgggtgtagtttttttttttgtttaggatttagaagttatgatagtatagagttttttaattgtggttggtgtttttttaggaattttttgaaagttatagagaaattttagagtggttgggtatggtggtttatgtttgtgattttagtattttgggaggttgaggtgggtggattatttgaggtttggagtttgagattagtttggttagtatggtaaaattttatttttattaaaaaatataaaaattagttgggtatggtggtatatgtttgtaattttagttatttaggaggttgaggtatgagaattgtttgaatttgggaggtagaggttgtagtgaattgagattgtgttattgtattttagtttgggtaatagagtaagattttattttaaaaaaataaaaaataaaaaaagaatttttagagtaatttttaggtgttagtaggggtgtgatgtaattttagttttgtttttgtggtttattggttttgggtaagtttttttgttgttgttatttatagagagtttttaggggagtttgggaatgatggtaagttttatgtgatttagtatgtaaagggagttttaaaatttagaatttagagagttagggtgggtatagtgtagttggttttagtgttgaggggttgggggagagattttgtattatgttttgattatagtaagggaagattatggaggtttttggaatgttttagtaatggtgtaattttagttttttttatttttttgttaatgataattatgattatgatagtagttaataggttatagagtaggtattttttagtttttttaaatatgaatttgtttaatttttataataatatagtattgttttatttaataaatgaggtaggttgggtgtggtggtttatgtttgtaattatagtattttgggaggttaaggtaggtagattatgaggttaggagtttgagattagtttgattaatatggtgaaattttatttttagtaaaaatataaaaattagttgggtgtagtggtatgtttttataattttagttatttaggaggttgaggtaggagaattatttgaatttgggaggtggaggttgtagtaagttgagattatgttattgtattttagtttgggagatagagtgagattttgttttaaaaataaataaataaataaaattaaaaaatattatatatataaaaaaataaatgaggtaaatgagatgtatgaggtgagaattttgtgttatagggagaggtgtagtttggtgagatttaattttaaggggttggtggttttgagtttttaagtgtaattattggattatattgtttgtagattattattatttttattttattggaaggttgggtgaggtaattgggaaagtttggagtagtagtggagttgttagagagaatttgtttttagtgtttttttggattttgtagttgttttgtgtgggtttttgttgttttttgtattggaaaagatttttttatagatggggttttatgatgttatttaggttggagtgttgtgtttatttttaggtgttgttatagggttgtagttttgaatttttggttttaagtgatttttttgttttagttttttgagtagttttttgggtttaagtgatttttgtgttttagttttttgagtagttttttgggtttaagtgatttttgtgttttagttttttgagtagttgggattttaagtgtatttggttaagtttttttttattttttattatttaagatttttttttttttaaggtttagtttaattttatttttatttaaaatttttggggtatttttgtagtatttggaggttgaattgtttaggagggaagggtgttaatgagttggtgttttgtttttattttgatttttggtgagaatgtaagttttttgtaggtaaggattatattttattattatttttgtatttatttagatttggttatgtgtgtttagtatataaagtgtttttgatgattgtttatagatttatggtatttgagattgttttaatatatttttttaaaattttttttttttttagaggtttatgaatgtttaaattaggtttattgggaataatattatggttattttgtttattttgaagtttatatataggtttggaagtaataattttgtatagtttagatgaaaaaataaagatttttttgttgtttttggattgttagagttttgggggatttttaatattttttgttgttttttttaattttatggtgttgatggtttgttggggggttagtttgatttttgtgagtgtttgtatttggaaaagggttggtgttaagatagttttaggatatttagaatgagggtaagaggttatttttattattagttttttttagttttattttatataattgtaatatagtgatttagtatattttgggttattgttaagtagggagtaaattagaaatggtttgagttttttttttttttatttttagaggggtttgtttttttaggtaaatataaggaggtattgaggttgttgtataagagttggtttttgtttattttataaattttatttttatttattgtaaaaggttttgtttttttttttaaaaaaaaaaaaaaaaaagaaatttagtgaggggtggggtaggtgtgtgtggaggagaggagaaaaggataagtgatggtttttttattttttagtaagttgtaggtgtagagattttaagtttgttttagggtttttttggtatttgtgtaggagggtttttgtagaaaaaatttaggatttatgatttgggaggattttggttatttttattgtttggatttattagtgggaggtaaagtgtaagaaattaagggtaaagggttttttttgggtgggttagagattttttggaaagggttatgtattgtgtgatttttataataattttaagtatttggagtatgttggggaggaagttttggtgttaaaattaagtatgtgttatttggaagtttgtttttgtttattagtatattaatttatttatgtttttgatagagttgtgttttgggtgtgtagagggttattttgtttgtaataattgggtgaaagttgaaattttaagttattgatttagaagggtatttttggggaagttttgagtaattttttttgagataaggtattttattatttattttggtttttaaatatggaaagttagaggaaattgataatggtttaaaggtagggggatggttttgatgatttttttatttttaattaaggtttatgattttgtttttttattaataaaaattaatttatggatttttggtaggtatttttttatttgaatgaattaaaggagggatattaaataaatggtttttagatttagaagaggagatgttatttataatttgaggattgaggaggataaaggattttgtttgtttggattttttggagaaaattataaaggaaaaaaaaaaggaaggaaaagataaataatgaagatttggattttttttaatttgtttttgtggttttggtgtgtttatttgtgaaatggaattttagagtgttagagtgggagttttttatgaaatgaaagtttttgaattggtttatggtgaggtttaagttaggttttttttgtttatttaaggtgggttttgttagggtggagtgaggatgttagttgtgggtggtgttttgagtgtaaaatgtgaatttgagttgttaagtttgggtgttgttggatggttttatttggaggttgttttgtgttttattaagtagaggagaaattgaagagaatttgaagaaaggatgttgtggtttggattattagttttagaggttgaatttaaggatatttttttatttagttttgattttatttatttatatagatgtatagggatttaaagtatttggttgatttggaaagttagtgatttttgtgagggtgtaaggggtgaggaagagggagtgttttttagggtagtttttttgatatttgagtaagggttggagatagtgtaggggatggttggtttaggttgaaagtggtttgatagtggttttgttttgggaggaatttgatttgtagtgtgtttgttgtggggatttgtttagttttgggggtgttttgttatttttggttgtaggtatttaggtgagtagtgttggttttgggatattgatttttttttattttgggtgtgaagtttatttgagtaagatttttttatggtgtttttgtggttgttgtttttaggaaagtgtggtggtgaggtagtggggtgtgtgtttttagggtgttaattttgggttggtagtaggaaggtgggaagagggggtggtttgttgtttggagtgtattgattgggttttgttttggttttgtttttgttttgtttttttttggagatgtgtatagaattttggtttagttggttgtggttttgtttttgatttgttttttttttgttttgtgaatgtgtgtgttgagttttatttttgtttatttttgtgttgtgttgtatttggtggagtggggttggtgggtgttgggtttgggagggggtgtttttgtgtggtagtgtagattagattagattaggttaggttgggggtgggggttgtttgtgtggtttgttgtgtttgtagttttgtatttttagttttttgtgttggtgttaatggttggttttgggagttgttgtattttttagttttgagtttgggtggggtgggtttggttaggtggaagtgggtggaggtgtgggtgttttgggtggttttgttgggtgaggtggtggtgttgggtattgtggtggtgttgggtatagttgggggttggagttggggtgttggtttagtgggttggggtagggtgggataggatatttgttttgttatttttttggtaattaaaagggtagagtgtgttgattgagttggagttttagtttttttatttgtaaatgggtgtgttggatagatgattatttgttttttttgtgttgggtattgtgtgtagtttggtgtattggtgtagtggggtagatatagggagttgttttttataatttgggtaatg

SEQ ID NO: 67 - DNA, 1405 bp, Artificial Sequence
  chemically treated genomic DNA (Homo sapiens)
tgttatttgagttgtaaagggtggttttttgtgtttgttttgttgtattgatatattgagttgtgtatggtgtttagtgtagggagaataaatgattatttgtttaatgtgtttatttataggtgaggaaattaaggttttaatttaattgatgtattttgtttttttgattattagaaaagtagtaggataggtgttttgttttgttttattttggtttattaagttggtattttggttttgatttttggttgtgtttggtgttgttgtggtgtttggtgttgttgttttgtttggtggggttgtttggagtgtttgtatttttgtttgtttttatttggttgggtttgttttgtttggatttgggattgggaagtgtggtgatttttggaattagttattggtgttagtgtggggagttgggggtgtagagttgtgggtgtggtgggttatgtaggtggtttttatttttggtttggtttggtttggtttggtttgtgttgttgtgtgggggtgtttttttttaggtttggtgtttgttagttttgttttgttaggtgtagtgtagtgtaggggtgggtgggggtggggtttggtgtgtatgtttatggggtggggagggggtgggttaggggtgggattatagttggttgggttggggttttatgtgtatttttggggaggggtggggtgggggtggggttggggtggggtttggttggtgtattttagatggtgggttgttttttttttttgtttttttattattggtttaggattagtgttttgggagtgtgtgttttgttgttttgttgttatatttttttgggagtggtggttatggaggtattatgaagaagttttatttaggtgggttttgtgtttggggtggggaggggttggtgttttgggattagtgttgtttatttgagtgtttgtggttgggagtggtgaggtgtttttggagttgagtgagtttttgtggtgggtatattgtaggttgagttttttttaggatagggttgttgttgggttgtttttgatttgagttgattgttttttgtgttgtttttagtttttgtttgagtgttggaggggttgttttgggggatgtttttttttttttgttttttgtatttttgtaggaattgttgattttttaggttggttgggtgttttgggtttttgtgtgtttgtgtgggtgaatggggttggggttaggtggaggggtgtttttgggtttagtttttagggttggtggtttaggttgtagtattttttttttggattttttttggttttttttttatttagtggggtatgggatggtttttagatgggattgtttagtagtgtttaaatttggtgatttgggtttatgttttgtgtttaggatgttgtttgt

SEQ ID NO: 68 - DNA, 1405 bp, Artificial Sequence
  chemically treated genomic DNA (Homo sapiens)
gtgggtggtgttttgagtgtaaaatgtgaatttgagttgttaagtttgggtgttgttggatggttttatttggaggttgttttgtgttttattaagtagaggagaaattgaagagaatttgaagaaaggatgttgtggtttggattattagttttagaggttgaatttaaggatatttttttatttagttttgattttatttatttatatagatgtatagggatttaaagtatttggttgatttggaaagttagtgatttttgtgagggtgtaaggggtgaggaagagggagtgttttttagggtagtttttttgatatttgagtaagggttggagatagtgtaggggatggttggtttaggttgaaagtggtttgatagtggttttgttttgggaggaatttgatttgtagtgtgtttgttgtggggatttgtttagttttgggggtgttttgttatttttggttgtaggtatttaggtgagtagtgttggttttgggatattgatttttttttattttgggtgtgaagtttatttgagtaagatttttttatggtgtttttgtggttgttgtttttaggaaagtgtggtggtgaggtagtggggtgtgtgtttttagggtgttaattttgggttggtagtaggaaggtgggaagagggggtggtttgttgtttggagtgtattgattgggttttgttttggttttgtttttgttttgtttttttttggagatgtgtatagaattttggtttagttggttgtggttttgtttttgatttgttttttttttgttttgtgaatgtgtgtgttgagttttatttttgtttatttttgtgttgtgttgtatttggtggagtggggttggtgggtgttgggtttgggagggggtgtttttgtgtggtagtgtagattagattagattaggttaggttgggggtgggggttgtttgtgtggtttgttgtgtttgtagttttgtatttttagttttttgtgttggtgttaatggttggttttgggagttgttgtattttttagttttgagtttgggtggggtgggtttggttaggtggaagtgggtggaggtgtgggtgttttgggtggttttgttgggtgaggtggtggtgttgggtattgtggtggtgttgggtatagttgggggttggagttggggtgttggtttagtgggttggggtagggtgggataggatatttgttttgttatttttttggtaattaaaagggtagagtgtgttgattgagttggagttttagtttttttatttgtaaatgggtgtgttggatagatgattatttgttttttttgtgttgggtattgtgtgtagtttggtgtattggtgtagtggggtagatatagggagttgttttttataatttgggtaatg

SEQ ID NO: 69 - DNA, 1818 bp, Artificial Sequence
  chemically treated genomic DNA (Homo sapiens)
tgttgtttgtttttggtttttttgatagttgtgttttatttttgttttgtgtttttttttttggatagtgttttttttagggtttatttaggagggtgtagtggtggtttttggggtggtggttgtggtgggggtgttagttgtaggggtgtttttggtgggtgggagttggtggttttttgttggtgttatgggatttgtatgtttgttttgtgttttttggtttttgagtttataggttgggattttgtttgttagttgtgtgtgttgttgtttaatttttgtaggtgtagagtgtgtggtggtggtgatagagaattttgtttggttgtttaaatatagttttttgtagaaggattttgtgtttggggaaggggaggaatttttttttttttgggtgtttgttttttttgttatggtttggtttttatatttgtttatatttggttgtagtggggtgtttggggggaggggttgaggttgtgttttttgttgttttttgggtgtgggttaggtggggaggaggggggtgttttggttgtgtgtttaggattgttttttagtggttatttgggttttagttttttaggtttggttttgataggtgggtggagtagttagtgtgagatagggaggttggtgtgggtgtgggaatttgatttgtttgggaggtgggggtggggtgggggtgtagtgtgtggggaggggttggtgtttgttttttttttttatttatttagttgagttagggggtttaggggtttttttggtggttagttttgtattgtaggagtgtgggtgtggtgttttagttagtgtgtagggtttgggttttgttgggggtgtttttttgttgttgttttttgtgtgatttgttgtttattagttattatgttggattttgtggttaatgtgtagttggatgggattattttggattttgaaggtgggtgttgggttggttgttgtggttgtggatgtgttggagaggattttgtgggtgggtttggtgtgggatgggggtgtgttgaggggagatgggagtgtgttgaggggagatgggatttttaatttaggtgtttttttgttgagagtgttgtgtgtttttggttttgtgtttgtgttgtttatgtgggggattttgttaggggtatttgtgtagattttgtgtgtttttataggattttgtgtttgttttgtgtattgttgtttgggtttttttttttttattgttgtttgtgtttgttaagtgatagtgatttttttgagggtttgtgaggttgttttggaattttttaggatgtatagttttattttgggaaatttattggttttttttttttggttttttttggtggtttttgggttttgtttggatttggtaatgggatagggaggttgttttttatttttgattgagtggatagttgtgttttgtttgggtggatagttttttttttttttatgttagttttggggttgttaagttgtgtagtttgtgggttgggagtattgaatggatatagtttaggttgtggtagggtttagagtgggatgttttatggtttttatttaggtttggggatatttttatttgttttttagaattgggttgtgggggatagaaggggtttgtgtgtgggtagggagagtattttggtttttttttgtttttggggtttataaagtgtgttgggatttgtggggttgttttgtttaagtttgggtttggtgtttgtgtttttgagtttgtgagtgtgtgtgtttttttgtgtttttttgattgttggtgttggggttttgtgttttgtgtttgtg

SEQ ID NO: 70 - DNA, 1818 bp, Artificial Sequence
  chemically treated genomic DNA (Homo sapiens)
tgtgaatgtaaaatgtaaaattttaatattgataattaaaaaaatgtaaaaaaatgtatgtatttataaatttaaaaatgtgaatgttaaatttaaatttaaataaaataattttgtaaattttaatatattttataaattttgaaaataaaaaaaaattaaaatattttttttatttgtatgtaaattttttttattttttatgatttgattttaaaaaatgaataaaaatatttttaaatttaaataaaaattataaaatattttattttaaattttattatgatttaaattatatttgtttgatatttttgatttatgaattatataatttaatgattttgaaattaatgtaaaaaaaaaaaaaattatttatttgaataaaatgtgattatttatttaattgaaaataaaaaatgatttttttattttgttattgaatttaaatgaaatttgaaaattgttgaaaaaaattaaaaaaaaaaaattgataaattttttaaaataaaattatatgttttaaaaaattttgaaataattttgtgaatttttgaaaaaattgttattgtttaataaatataaataataataaaaaaaaaaaaatttaaatgataatatgtaaaatgaatataaaattttataaaaatgtgtaaaatttatgtgaatatttttaataaaattttttatgtaaatgatgtgaatatgaaattgaaaatgtgtgatgtttttaatgaaaaaatgtttaaattaaaaattttgtttttttttaatgtatttttgtttttttttaatgtatttttgttttgtgttaaatttatttgtaaaattttttttaatatgtttgtgattgtaataattaatttaatatttatttttgaaatttgaaataattttatttaattatgtgttaattgtgaaatttgatataataattaataaataatgaattgtgtgaaaaataatgatgaaaaaatgtttttgatgaaatttgaattttatgtgttaattaaaatgttgtgtttgtgtttttataatataaaattaattgttgaaaaaatttttaaattttttaatttaattaaataaataaaaaaaaaaaatgaatgttgatttttttttgtgtgttatgtttttgttttgtttttgttttttgaatgaattaaatttttgtatttgtattgatttttttattttgtattaattattttgtttgtttattaaaattaaatttaaaaaattaaaatttgaataattgttaaaaaataattttaaatatatgattgaaatgttttttttttttttgtttaatttgtgtttaaaaaatgatgaaaaatgtgattttaatttttttttttgaatgttttgttatgattaaatataaatgaatataaaaattgaattataatgaaaaaaatgaatgtttaaaaaaaaaaaaatttttttttttttttgaatgtaaaatttttttataaaaaattatatttaaataattaaataaaattttttattattgttgttgtgtgttttatgtttataaaaattaaatgataatgtatgtgattaataaataaaattttgatttataaatttaaaaattgaaaaatgtaaaatgaatatatgaattttataatattaatgaaaaattattaatttttatttattgaaaatatttttataattaatatttttattatgattattgttttgaaaattattgttatatttttttaaataaattttaaaaaaaatattatttgaaaaaaaaaatataaaatgaaaataaaatatgattattaaaaaaattaaaaatgaatgatg

SEQ ID NO: 71 - DNA, 20 bp, Artificial Sequence
  chemically treated genomic DNA (Homo sapiens)
ggagtggaggaaattgagat

SEQ ID NO: 72 - DNA, 22 bp, Artificial Sequence
  chemically treated genomic DNA (Homo sapiens)
ccacacaacaaatactcaaaac

SEQ ID NO: 73 - DNA, 33 bp, Artificial Sequence
  chemically treated genomic DNA (Homo sapiens)
tgggtgtttgtaatttttgttttgtgttaggtt

SEQ ID NO: 74 - DNA, 23 bp, Artificial Sequence
  chemically treated genomic DNA (Homo sapiens)
tttcgtttcggtttttagcgtag

SEQ ID NO: 75 - DNA, 17 bp, Artificial Sequence
  chemically treated genomic DNA (Homo sapiens)
aaccaaccgcgactccg

SEQ ID NO: 76 - DNA, 22 bp, Artificial Sequence
  chemically treated genomic DNA (Homo sapiens)
cgatttcaaccgcgcgatcgaa

SEQ ID NO: 77 - DNA, 16 bp, Artificial Sequence
  chemically treated genomic DNA (Homo sapiens)
cgtggtttcggggacg

SEQ ID NO: 78 - DNA, 18 bp, Artificial Sequence
  chemically treated genomic DNA (Homo sapiens)
cgtctacacgcgaaacgc

SEQ ID NO: 79 - DNA, 25 bp, Artificial Sequence
  chemically treated genomic DNA (Homo sapiens)
cacatcgaaatcgtacgcgctctcg

SEQ ID NO: 80 - DNA, 19 bp, Artificial Sequence
  chemically treated genomic DNA (Homo sapiens)
caccttcccgaaaaacgaa

SEQ ID NO: 81 - DNA, 27 bp, Artificial Sequence
  chemically treated genomic DNA (Homo sapiens)
atggtagtagagatttcgagtaaacgg

SEQ ID NO: 82 - DNA, 28 bp, Artificial Sequence
  chemically treated genomic DNA (Homo sapiens)
cgaatccgactctaacgaaacgctacga

SEQ ID NO: 83 - DNA, 22 bp, Artificial Sequence
  chemically treated genomic DNA (Homo sapiens)
gaagtagtcggggtcgtttacg

SEQ ID NO: 84 - DNA, 20 bp, Artificial Sequence
  chemically treated genomic DNA (Homo sapiens)
gcaaaatacgcgaaaaccgt

SEQ ID NO: 85 - DNA, 23 bp, Artificial Sequence
  chemically treated genomic DNA (Homo sapiens)
acgtcttctctcgccccgaacga

SEQ ID NO: 86 - DNA, 20 bp, Artificial Sequence
  chemically treated genomic DNA (Homo sapiens)
tcgtgtgtgtcgtttttcgg

SEQ ID NO: 87 - DNA, 19 bp, Artificial Sequence
  chemically treated genomic DNA (Homo sapiens)
attcccgacgactccgaat

SEQ ID NO: 88 - DNA, 33 bp, Artificial Sequence
  chemically treated genomic DNA (Homo sapiens)
caacgaaaacgaaaaaatacgactacgtctcga

SEQ ID NO: 89 - DNA, 20 bp, Artificial Sequence
  chemically treated genomic DNA (Homo sapiens)
tttgaagcggttttcgtatc

SEQ ID NO: 90 - DNA, 20 bp, Artificial Sequence
  chemically treated genomic DNA (Homo sapiens)
ccgaacgcttacctacaatc

SEQ ID NO: 91 - DNA, 22 bp, Artificial Sequence
  chemically treated genomic DNA (Homo sapiens)
ttgcggtgggcgttttcgggtt

SEQ ID NO: 92 - DNA, 19 bp, Artificial Sequence
  chemically treated genomic DNA (Homo sapiens)
tttgtagtcgcgtcgtcgt

SEQ ID NO: 93 - DNA, 20 bp, Artificial Sequence
  chemically treated genomic DNA (Homo sapiens)
ctaactaaaacgcgccgaaa

SEQ ID NO: 94 - DNA, 22 bp, Artificial Sequence
  chemically treated genomic DNA (Homo sapiens)
tcgacgtaaacttccccgcgct

SEQ ID NO: 95 - DNA, 20 bp, Artificial Sequence
  chemically treated genomic DNA (Homo sapiens)
atttcggaaagcgtttttcg

SEQ ID NO: 96 - DNA, 25 bp, Artificial Sequence
  chemically treated genomic DNA (Homo sapiens)
caactccgaataaattaccaacgac

SEQ ID NO: 97 - DNA, 33 bp, Artificial Sequence
  chemically treated genomic DNA (Homo sapiens)
ttacgataacacttacacgaccaaaacgacgaa

SEQ ID NO: 98 - DNA, 21 bp, Artificial Sequence
  chemically treated genomic DNA (Homo sapiens)
cgtttttcgttttattttcgc

SEQ ID NO: 99 - DNA, 18 bp, Artificial Sequence
  chemically treated genomic DNA (Homo sapiens)
gacaaaaaacgccacgtc

SEQ ID NO: 100 - DNA, 22 bp, Artificial Sequence
  chemically treated genomic DNA (Homo sapiens)
ccgacaattcaccgaatcaccg

SEQ ID NO: 101 - DNA, 22 bp, Artificial Sequence
  chemically treated genomic DNA (Homo sapiens)
tcgcgagtttagttattcgttg

SEQ ID NO: 102 - DNA, 22 bp, Artificial Sequence
  chemically treated genomic DNA (Homo sapiens)
ccactctcgaaatatacgtcga

SEQ ID NO: 103 - DNA, 35 bp, Artificial Sequence
  chemically treated genomic DNA (Homo sapiens)
cgataaacgaaatctataatatacgaacgcgaaca

SEQ ID NO: 104 - DNA, 17 bp, Artificial Sequence
  chemically treated genomic DNA (Homo sapiens)
tagtcgttttggcggcg

SEQ ID NO: 105 - DNA, 18 bp, Artificial Sequence
  chemically treated genomic DNA (Homo sapiens)
aacgcacgaccaacacga

SEQ ID NO: 106 - DNA, 30 bp, Artificial Sequence
  chemically treated genomic DNA (Homo sapiens)
aaaaaacaccgaacccaacgcgataataaa

SEQ ID NO: 107 - DNA, 26 bp, Artificial Sequence
  chemically treated genomic DNA (Homo sapiens)
gtagtagttagtttagtatttatttt

SEQ ID NO: 108 - DNA, 24 bp, Artificial Sequence
  chemically treated genomic DNA (Homo sapiens)
gatttagagttgaatgtaaagtaa

SEQ ID NO: 109 - DNA, 18 bp, Artificial Sequence
  chemically treated genomic DNA (Homo sapiens)
ttttttggagttgaaagg

SEQ ID NO: 110 - DNA, 20 bp, Artificial Sequence
  chemically treated genomic DNA (Homo sapiens)
ttaggaaatgaaattggaga

SEQ ID NO: 111 - DNA, 20 bp, Artificial Sequence
  chemically treated genomic DNA (Homo sapiens)
aaacccaaacctaaattaaa

SEQ ID NO: 112 - DNA, 17 bp, Artificial Sequence
  chemically treated genomic DNA (Homo sapiens)
cccaccaaccatcatat

SEQ ID NO: 113 - DNA, 18 bp, Artificial Sequence
  chemically treated genomic DNA (Homo sapiens)
ctaaaacctcaacctaac

SEQ ID NO: 114 - DNA, 23 bp, Artificial Sequence
  chemically treated genomic DNA (Homo sapiens)
aaattactaccatctccaactac

SEQ ID NO: 115 - DNA, 23 bp, Artificial Sequence
  chemically treated genomic DNA (Homo sapiens)
tataaaaaattacttcccacatc

SEQ ID NO: 116 - DNA, 17 bp, Artificial Sequence
  chemically treated genomic DNA (Homo sapiens)
ggaagtgtgtggtaaag

SEQ ID NO: 117 - DNA, 32 bp, Artificial Sequence
  chemically treated genomic DNA (Homo sapiens)
accatcatatcaaaccccacaatcaacacaca

SEQ ID NO: 118 - DNA, 31 bp, Artificial Sequence
  chemically treated genomic DNA (Homo sapiens)
cctaacatcttctctcaccccaaacaaaaca

SEQ ID NO: 119 - DNA, 31 bp, Artificial Sequence
  chemically treated genomic DNA (Homo sapiens)
caactacaacccaacccaatctacaaacatt

SEQ ID NO: 120 - DNA, 37 bp, Artificial Sequence
  chemically treated genomic DNA (Homo sapiens)
ccacatcaaaatcatacacactctcaaacaaaaaaca

SEQ ID NO: 121 - DNA, 28 bp, Artificial Sequence
  chemically treated genomic DNA (Homo sapiens)
taaagtgttggggttttgtttggttgtt

SEQ ID NO: 122 - DNA, 25 bp, Artificial Sequence
  chemically treated genomic DNA (Homo sapiens)
gttcgaaatgattttatttagttgc

SEQ ID NO: 123 - DNA, 23 bp, Artificial Sequence
  chemically treated genomic DNA (Homo sapiens)
aacgaaacaaataccgtaaacga

SEQ ID NO: 124 - DNA, 22 bp, Artificial Sequence
  chemically treated genomic DNA (Homo sapiens)
ggttgggttttttaacgttcgt

SEQ ID NO: 125 - DNA, 16 bp, Artificial Sequence
  chemically treated genomic DNA (Homo sapiens)
ggtttcggggacgcgt

SEQ ID NO: 126 - DNA, 23 bp, Artificial Sequence
  chemically treated genomic DNA (Homo sapiens)
aaacaaacgtccgaaaaaaacga

SEQ ID NO: 127 - DNA, 17 bp, Artificial Sequence
  chemically treated genomic DNA (Homo sapiens)
cgttgatcgcggggttc

SEQ ID NO: 128 - DNA, 24 bp, Artificial Sequence
  chemically treated genomic DNA (Homo sapiens)
ccgactacttctacatttcgaacg

SEQ ID NO: 129 - DNA, 20 bp, Artificial Sequence
  chemically treated genomic DNA (Homo sapiens)
atcgggtcgggttgtagttg

SEQ ID NO: 130 - DNA, 17 bp, Artificial Sequence
  chemically treated genomic DNA (Homo sapiens)
ttcgttcgagagcgcgt

SEQ ID NO: 131 - DNA, 18 bp, Artificial Sequence
  chemically treated genomic DNA (Homo sapiens)
caaacgaaaccccgacgc

SEQ ID NO: 132 - DNA, 4333 bp, Homo Sapiens
atgtatatcttaatgaattatagaaagctatctaaatgaactaattcatgctagggtacagatacacttcattcattttaaaagatgagcttcttatcaaaaaggaatttctaattagtggcattacaactttgaagccaacatggtatgtatattcaaccaatgtaataaaacactccagttctgatatgagacaaatgtttctaatcattttcgggctgaaattctaccctagagaagcttgctttatgaaacaatcaggaatgagatttcaggaaattatgagaacttgacatgatcctttgaattgatcttcgaatgagttgtctttcatttattttctatggggaattttaggataatgaaggagcaaatatttctccttttgaaatgtatgtttttgttcattactgttcttgggaggggtgaagaataaggtggttcgtgtctaggagtctgcaagtacataagcctactacatacagtgctttgggtaaaaactgacatcaaatttgctttggcatacacctgtattgtcctcaacaactgccttaaaatttggctttcccagtcattaccctcactcagcatctccttgatctctcctctccatattcaaacacattttgaaggcttcctgtcttctctctctctctctctctctctctctgtatacacaccccattctcagggaagaaaactatcttgttaacctgacaaccttacctaaacttattggagagagcagaattcaaaccctatggcaatcttttggcaatgtcctggaggatttgtgtccccaagacagggatttcagaaaggggaatatacaaatctagcagtaagatactttttctcagcaggagtttctagtctctttcaaataccttgcaatagaggatggcttgctccaatacacacccgcggttctatgagtctgtactgaagtcggatatccataatattttccccaacatcctatcatttttctcccttgacaaccatgttttgagaacttgaagcaacagatatgaagagtcttaagggattgcatcaatgtacgctaagattagtctctaccacatagtccaatgacacggttttaggttcagaagggatgctctacacccacagaatcccaccgagttcaggtgccagctcagagaactcatcaccttcctgtttcccttcaagagttaactgatgggatagtatgcaaagcacatgcgttcttgctgccaaaatagcagccaaaactgcctgcctagatgtgtaagatcccatgaaatgtcttggcaaaagctagtttaggagtgttggccaaggtgctgaagcgaagcaaggggagtcaggaccacctttgccactgaatctcccctcccccacctctttttaaagacagcgagcttattcattttgacaagataccctaggatttcaaatctgacataattttggagaaagcagtgcgtgtgtgtgtgtgtgtgtgtgtgtgtgtgtgtggtgtagaagggtatctgggatacataatctttatagaaattctagtgccacaaaaattctaggaggatctacatttaaaaaaacacacaacagtttaagctgtttattccaattgaacgctgtgtgtttccatcagatcctcagtgagattcagtccaatgagtcaattgcaaaataaagtttttgtcaagggaatggcagaaaatgacaaaaccacaattctgaatgatcattcaaaagtaaaaagtactttctactactgtgtggagattttcttatctctacttttactcgaattgaatcttttcttctaatgttcttttgaacagtttgtctttggtgtcctgaaaatgtgcacgctgatagcagtaccacatgctgtccctggcacagagtgagctaacagttgaaccacctctgggtaactgcggactgcagctagtgtaagtgcaagagaaggcaccctggccaccaattcgtttcacactccaatcacccccgcccgctctacaccccctgggcacccgatgcctcttccctctgccaggcaatttgcttccgttctgttcaactttccgacctctggctttagagaatagtcctggctgtgggaactggctctgggaagcttttggcgccctcctcattggtgactggcaagagtaacactttcacactcttaaaaagagccgtttagttcctaatgatattttctggcaaaaaagaaaatgaaacacacaacccggattccggtccaccaaacgcaggccaagagcgcggctgctgagccccggtcttgctgtgaggctgttgttcccactcgcttcccgtttccactagagttgatttgtctcttgccacctctccccggcagtgtggacctactgcaacgcaggaacatctgggttggtatggataggatcctagcatcagatgctggctgctgccccagggacttcccgcggaaatcacccagcacttagaagccgtttcaataaggaagtaaccagtaaagcattgctggtgggagaaccccgcgaaacatcttagaaaaatatcagaaaccgctggagacctaatgacccacgtctcctccagcctgtgttcctcagccctttctggaggagtattaagtggtttgtgggtttttaccctgcggtgggagggctgttccaagtacatctatttctgcgatagttaacgtcggggggccccagctctaaccagggcgaggaccacggactgcatccctctctctcagcgcactggtctgtttactggagggtgagagggacgcgcagacctccggactcaggggttctgttctgtagatccccccaccccacccggggtctctggcactcgtatcacttagcaccagtgtgactggcggtgcattccggccccctcgcgccccattaaagcccctgcacatcctctcccacgctgcgcttctgctacccacgcagctgctcctctgagcgtcccgcgtgcacaaacgcgcccccggtccttacgcgtcggtggcgctgcctcgctgaggtggcgccgggggagcccgcagaggcggcgggggagggagtgcggaggagaggacccgtgagctgcggggacctgggcccgccgagcttttggggaagctgggctccgttccccccgggcgcctggggcgcgcgggaaggcgcggaggacgcgccgcactcacccgctgctgctgccggctgctgactgccaccgcggcggcggacgcggcgctgtgccggagctcggccgcctgcccaggtctcaacaggctccgggtgaacctgcgggtccgctcaccggccatcgccggtcacgccaatcgcgccgcgggcccggggcgcgcctcccgccggtcttccccgcgccaaccttctctatccacccgccgttcaggaagcggaactcggagccttcccccccctcttcctcgctcaactcgcaagaggcgggtttttctctcttgcacccccactcttcccacccccttccctcctctgaagcttctcgaagactttccaaactctgcgctcccccgggcgcgcgcggccaactcggctggcggccgggccctgcagcggcgcatctggagcgggcgtcgcgggacgcgtgtggggcggctcctgcccgcgccgcccacacgggctcagctggccggccggggctgtccacgccgcccgggggaactgcaggctgcgggggagggcggggggcggccgccgaggggctccgggcggggcctgtccaaggccgtcgcctgtccaaggccgtcagcctcatttggaggttgctgggagagttggagccctggatgcatttgccgtttagacttctattttctgggtccggctagtgggtgggggccaagctcggttcgcccttccaccctcgggaaggggtcagaggcttattaaagatctggtggctgggatcccagcagcatcgcccaagccagcgtttggaaggctcccttgccagaagtccatgttcagggccttggaataagcttccccattcattcactccttcaatgagtatttattaagcgcctactatatgccagctcacactgttctggaaactgaggatacggagaggaacttagcaactacactttaaggctgtgtagagctgataggttttttcggggtaggggtgggagacagcaagtaaccaagcgaacaaataaacaaatacagagaaatcaaggagacagtttaagctactaacacgaactcaaaaccaataaatcagcgttctgggggtaagagactttgggtggcattaggatgagtaggcaagaaccaac

SEQ ID NO: 133 - DNA, 2333 bp, Homo Sapiens
accatgttttgagaacttgaagcaacagatatgaagagtcttaagggattgcatcaatgtacgctaagattagtctctaccacatagtccaatgacacggttttaggttcagaagggatgctctacacccacagaatcccaccgagttcaggtgccagctcagagaactcatcaccttcctgtttcccttcaagagttaactgatgggatagtatgcaaagcacatgcgttcttgctgccaaaatagcagccaaaactgcctgcctagatgtgtaagatcccatgaaatgtcttggcaaaagctagtttaggagtgttggccaaggtgctgaagcgaagcaaggggagtcaggaccacctttgccactgaatctcccctcccccacctctttttaaagacagcgagcttattcattttgacaagataccctaggatttcaaatctgacataattttggagaaagcagtgcgtgtgtgtgtgtgtgtgtgtgtgtgtgtgtgtggtgtagaagggtatctgggatacataatctttatagaaattctagtgccacaaaaattctaggaggatctacatttaaaaaaacacacaacagtttaagctgtttattccaattgaacgctgtgtgtttccatcagatcctcagtgagattcagtccaatgagtcaattgcaaaataaagtttttgtcaagggaatggcagaaaatgacaaaaccacaattctgaatgatcattcaaaagtaaaaagtactttctactactgtgtggagattttcttatctctacttttactcgaattgaatcttttcttctaatgttcttttgaacagtttgtctttggtgtcctgaaaatgtgcacgctgatagcagtaccacatgctgtccctggcacagagtgagctaacagttgaaccacctctgggtaactgcggactgcagctagtgtaagtgcaagagaaggcaccctggccaccaattcgtttcacactccaatcacccccgcccgctctacaccccctgggcacccgatgcctcttccctctgccaggcaatttgcttccgttctgttcaactttccgacctctggctttagagaatagtcctggctgtgggaactggctctgggaagcttttggcgccctcctcattggtgactggcaagagtaacactttcacactcttaaaaagagccgtttagttcctaatgatattttctggcaaaaaagaaaatgaaacacacaacccggattccggtccaccaaacgcaggccaagagcgcggctgctgagccccggtcttgctgtgaggctgttgttcccactcgcttcccgtttccactagagttgatttgtctcttgccacctctccccggcagtgtggacctactgcaacgcaggaacatctgggttggtatggataggatcctagcatcagatgctggctgctgccccagggacttcccgcggaaatcacccagcacttagaagccgtttcaataaggaagtaaccagtaaagcattgctggtgggagaaccccgcgaaacatcttagaaaaatatcagaaaccgctggagacctaatgacccacgtctcctccagcctgtgttcctcagccctttctggaggagtattaagtggtttgtgggtttttaccctgcggtgggagggctgttccaagtacatctatttctgcgatagttaacgtcggggggccccagctctaaccagggcgaggaccacggactgcatccctctctctcagcgcactggtctgtttactggagggtgagagggacgcgcagacctccggactcaggggttctgttctgtagatccccccaccccacccggggtctctggcactcgtatcacttagcaccagtgtgactggcggtgcattccggccccctcgcgccccattaaagcccctgcacatcctctcccacgctgcgcttctgctacccacgcagctgctcctctgagcgtcccgcgtgcacaaacgcgcccccggtccttacgcgtcggtggcgctgcctcgctgaggtggcgccgggggagcccgcagaggcggcgggggagggagtgcggaggagaggacccgtgagctgcggggacctgggcccgccgagcttttggggaagctgggctccgttccccccgggcgcctggggcgcgcgggaaggcgcggaggacgcgccgcactcacccgctgctgctgccggctgctgactgccaccgcggcggcggacgcggcgctgtgccggagctcggccgcctgcccaggtctcaacaggctccgggtgaacctgcgggtccgctcaccggccatcg

SEQ ID NO: 134 - DNA, 4333 bp, Artificial Sequence
  chemically treated genomic DNA (Homo sapiens)
atgtatattttaatgaattatagaaagttatttaaatgaattaatttatgttagggtatagatatattttatttattttaaaagatgagttttttattaaaaaggaatttttaattagtggtattataattttgaagttaatatggtatgtatatttaattaatgtaataaaatattttagttttgatatgagataaatgtttttaattattttcgggttgaaattttattttagagaagtttgttttatgaaataattaggaatgagattttaggaaattatgagaatttgatatgattttttgaattgattttcgaatgagttgttttttatttattttttatggggaattttaggataatgaaggagtaaatatttttttttttgaaatgtatgtttttgtttattattgtttttgggaggggtgaagaataaggtggttcgtgtttaggagtttgtaagtatataagtttattatatatagtgttttgggtaaaaattgatattaaatttgttttggtatatatttgtattgtttttaataattgttttaaaatttggtttttttagttattatttttatttagtatttttttgattttttttttttatatttaaatatattttgaaggttttttgttttttttttttttttttttttttttttttgtatatatattttatttttagggaagaaaattattttgttaatttgataattttatttaaatttattggagagagtagaatttaaattttatggtaattttttggtaatgttttggaggatttgtgtttttaagatagggattttagaaaggggaatatataaatttagtagtaagatatttttttttagtaggagtttttagttttttttaaatattttgtaatagaggatggtttgttttaatatatattcgcggttttatgagtttgtattgaagtcggatatttataatattttttttaatattttattattttttttttttgataattatgttttgagaatttgaagtaatagatatgaagagttttaagggattgtattaatgtacgttaagattagtttttattatatagtttaatgatacggttttaggtttagaagggatgttttatatttatagaattttatcgagtttaggtgttagtttagagaatttattatttttttgtttttttttaagagttaattgatgggatagtatgtaaagtatatgcgtttttgttgttaaaatagtagttaaaattgtttgtttagatgtgtaagattttatgaaatgttttggtaaaagttagtttaggagtgttggttaaggtgttgaagcgaagtaaggggagttaggattatttttgttattgaatttttttttttttatttttttttaaagatagcgagtttatttattttgataagatattttaggattttaaatttgatataattttggagaaagtagtgcgtgtgtgtgtgtgtgtgtgtgtgtgtgtgtgtggtgtagaagggtatttgggatatataatttttatagaaattttagtgttataaaaattttaggaggatttatatttaaaaaaatatataatagtttaagttgtttattttaattgaacgttgtgtgtttttattagatttttagtgagatttagtttaatgagttaattgtaaaataaagtttttgttaagggaatggtagaaaatgataaaattataattttgaatgattatttaaaagtaaaaagtattttttattattgtgtggagatttttttatttttatttttattcgaattgaatttttttttttaatgtttttttgaatagtttgtttttggtgttttgaaaatgtgtacgttgatagtagtattatatgttgtttttggtatagagtgagttaatagttgaattatttttgggtaattgcggattgtagttagtgtaagtgtaagagaaggtattttggttattaattcgttttatattttaattattttcgttcgttttatattttttgggtattcgatgttttttttttttgttaggtaatttgttttcgttttgtttaatttttcgatttttggttttagagaatagttttggttgtgggaattggttttgggaagtttttggcgttttttttattggtgattggtaagagtaatatttttatatttttaaaaagagtcgtttagtttttaatgatattttttggtaaaaaagaaaatgaaatatataattcggatttcggtttattaaacgtaggttaagagcgcggttgttgagtttcggttttgttgtgaggttgttgtttttattcgtttttcgtttttattagagttgatttgttttttgttattttttttcggtagtgtggatttattgtaacgtaggaatatttgggttggtatggataggattttagtattagatgttggttgttgttttagggatttttcgcggaaattatttagtatttagaagtcgttttaataaggaagtaattagtaaagtattgttggtgggagaatttcgcgaaatattttagaaaaatattagaaatcgttggagatttaatgatttacgttttttttagtttgtgttttttagttttttttggaggagtattaagtggtttgtgggtttttattttgcggtgggagggttgttttaagtatatttatttttgcgatagttaacgtcggggggttttagttttaattagggcgaggattacggattgtattttttttttttagcgtattggtttgtttattggagggtgagagggacgcgtagattttcggatttaggggttttgttttgtagatttttttattttattcggggtttttggtattcgtattatttagtattagtgtgattggcggtgtatttcggttttttcgcgttttattaaagtttttgtatatttttttttacgttgcgtttttgttatttacgtagttgtttttttgagcgtttcgcgtgtataaacgcgttttcggtttttacgcgtcggtggcgttgtttcgttgaggtggcgtcgggggagttcgtagaggcggcgggggagggagtgcggaggagaggattcgtgagttgcggggatttgggttcgtcgagtttttggggaagttgggtttcgtttttttcgggcgtttggggcgcgcgggaaggcgcggaggacgcgtcgtatttattcgttgttgttgtcggttgttgattgttatcgcggcggcggacgcggcgttgtgtcggagttcggtcgtttgtttaggttttaataggtttcgggtgaatttgcgggttcgtttatcggttatcgtcggttacgttaatcgcgtcgcgggttcggggcgcgtttttcgtcggtttttttcgcgttaattttttttatttattcgtcgtttaggaagcggaattcggagtttttttttttttttttttcgtttaattcgtaagaggcgggttttttttttttgtatttttattttttttattttttttttttttttgaagtttttcgaagattttttaaattttgcgttttttcgggcgcgcgcggttaattcggttggcggtcgggttttgtagcggcgtatttggagcgggcgtcgcgggacgcgtgtggggcggtttttgttcgcgtcgtttatacgggtttagttggtcggtcggggttgtttacgtcgttcgggggaattgtaggttgcgggggagggcggggggcggtcgtcgaggggtttcgggcggggtttgtttaaggtcgtcgtttgtttaaggtcgttagttttatttggaggttgttgggagagttggagttttggatgtatttgtcgtttagatttttattttttgggttcggttagtgggtgggggttaagttcggttcgtttttttattttcgggaaggggttagaggtttattaaagatttggtggttgggattttagtagtatcgtttaagttagcgtttggaaggtttttttgttagaagtttatgtttagggttttggaataagtttttttatttatttatttttttaatgagtatttattaagcgtttattatatgttagtttatattgttttggaaattgaggatacggagaggaatttagtaattatattttaaggttgtgtagagttgataggttttttcggggtaggggtgggagatagtaagtaattaagcgaataaataaataaatatagagaaattaaggagatagtttaagttattaatacgaatttaaaattaataaattagcgttttgggggtaagagattttgggtggtattaggatgagtaggtaagaattaat

SEQ ID NO: 135 - DNA, 4333 bp, Artificial Sequence
  chemically treated genomic DNA (Homo sapiens)
gttggtttttgtttatttattttaatgttatttaaagttttttatttttagaacgttgatttattggttttgagttcgtgttagtagtttaaattgtttttttgatttttttgtatttgtttatttgttcgtttggttatttgttgttttttatttttatttcgaaaaaatttattagttttatatagttttaaagtgtagttgttaagttttttttcgtatttttagtttttagaatagtgtgagttggtatatagtaggcgtttaataaatatttattgaaggagtgaatgaatggggaagtttattttaaggttttgaatatggatttttggtaagggagttttttaaacgttggtttgggcgatgttgttgggattttagttattagatttttaataagtttttgattttttttcgagggtggaagggcgaatcgagtttggtttttatttattagtcggatttagaaaatagaagtttaaacggtaaatgtatttagggttttaatttttttagtaatttttaaatgaggttgacggttttggataggcgacggttttggataggtttcgttcggagtttttcggcggtcgtttttcgttttttttcgtagtttgtagttttttcgggcggcgtggatagtttcggtcggttagttgagttcgtgtgggcggcgcgggtaggagtcgttttatacgcgtttcgcgacgttcgttttagatgcgtcgttgtagggttcggtcgttagtcgagttggtcgcgcgcgttcgggggagcgtagagtttggaaagttttcgagaagttttagaggagggaagggggtgggaagagtgggggtgtaagagagaaaaattcgttttttgcgagttgagcgaggaagaggggggggaaggtttcgagtttcgttttttgaacggcgggtggatagagaaggttggcgcggggaagatcggcgggaggcgcgtttcgggttcgcggcgcgattggcgtgatcggcgatggtcggtgagcggattcgtaggtttattcggagtttgttgagatttgggtaggcggtcgagtttcggtatagcgtcgcgttcgtcgtcgcggtggtagttagtagtcggtagtagtagcgggtgagtgcggcgcgtttttcgcgttttttcgcgcgttttaggcgttcggggggaacggagtttagtttttttaaaagttcggcgggtttaggttttcgtagtttacgggttttttttttcgtattttttttttcgtcgtttttgcgggttttttcggcgttattttagcgaggtagcgttatcgacgcgtaaggatcgggggcgcgtttgtgtacgcgggacgtttagaggagtagttgcgtgggtagtagaagcgtagcgtgggagaggatgtgtaggggttttaatggggcgcgagggggtcggaatgtatcgttagttatattggtgttaagtgatacgagtgttagagatttcgggtggggtggggggatttatagaatagaatttttgagttcggaggtttgcgcgttttttttattttttagtaaatagattagtgcgttgagagagagggatgtagttcgtggttttcgttttggttagagttggggtttttcgacgttaattatcgtagaaatagatgtatttggaatagtttttttatcgtagggtaaaaatttataaattatttaatatttttttagaaagggttgaggaatataggttggaggagacgtgggttattaggtttttagcggtttttgatatttttttaagatgtttcgcggggtttttttattagtaatgttttattggttatttttttattgaaacggtttttaagtgttgggtgattttcgcgggaagtttttggggtagtagttagtatttgatgttaggattttatttatattaatttagatgtttttgcgttgtagtaggtttatattgtcggggagaggtggtaagagataaattaattttagtggaaacgggaagcgagtgggaataatagttttatagtaagatcggggtttagtagtcgcgtttttggtttgcgtttggtggatcggaattcgggttgtgtgttttatttttttttttgttagaaaatattattaggaattaaacggttttttttaagagtgtgaaagtgttatttttgttagttattaatgaggagggcgttaaaagttttttagagttagtttttatagttaggattattttttaaagttagaggtcggaaagttgaatagaacggaagtaaattgtttggtagagggaagaggtatcgggtgtttagggggtgtagagcgggcgggggtgattggagtgtgaaacgaattggtggttagggtgtttttttttgtatttatattagttgtagttcgtagttatttagaggtggtttaattgttagtttattttgtgttagggatagtatgtggtattgttattagcgtgtatatttttaggatattaaagataaattgtttaaaagaatattagaagaaaagatttaattcgagtaaaagtagagataagaaaatttttatatagtagtagaaagtattttttatttttgaatgattatttagaattgtggttttgttattttttgttatttttttgataaaaattttattttgtaattgatttattggattgaattttattgaggatttgatggaaatatatagcgtttaattggaataaatagtttaaattgttgtgtgtttttttaaatgtagatttttttagaatttttgtggtattagaatttttataaagattatgtattttagatatttttttatattatatatatatatatatatatatatatatatacgtattgttttttttaaaattatgttagatttgaaattttagggtattttgttaaaatgaataagttcgttgtttttaaaaagaggtgggggaggggagatttagtggtaaaggtggttttgattttttttgtttcgttttagtattttggttaatatttttaaattagtttttgttaagatattttatgggattttatatatttaggtaggtagttttggttgttattttggtagtaagaacgtatgtgttttgtatattattttattagttaatttttgaagggaaataggaaggtgatgagttttttgagttggtatttgaattcggtgggattttgtgggtgtagagtattttttttgaatttaaaatcgtgttattggattatgtggtagagattaattttagcgtatattgatgtaattttttaagattttttatatttgttgttttaagtttttaaaatatggttgttaagggagaaaaatgataggatgttggggaaaatattatggatattcgattttagtatagatttatagaatcgcgggtgtgtattggagtaagttattttttattgtaaggtatttgaaagagattagaaatttttgttgagaaaaagtattttattgttagatttgtatatttttttttttgaaatttttgttttggggatataaattttttaggatattgttaaaagattgttatagggtttgaattttgttttttttaataagtttaggtaaggttgttaggttaataagatagtttttttttttgagaatggggtgtgtatatagagagagagagagagagagagagagaagataggaagtttttaaaatgtgtttgaatatggagaggagagattaaggagatgttgagtgagggtaatgattgggaaagttaaattttaaggtagttgttgaggataatataggtgtatgttaaagtaaatttgatgttagtttttatttaaagtattgtatgtagtaggtttatgtatttgtagatttttagatacgaattattttattttttattttttttaagaatagtaatgaataaaaatatatattttaaaaggagaaatatttgtttttttattattttaaaattttttatagaaaataaatgaaagataatttattcgaagattaatttaaaggattatgttaagtttttataattttttgaaattttatttttgattgttttataaagtaagtttttttagggtagaattttagttcgaaaatgattagaaatatttgttttatattagaattggagtgttttattatattggttgaatatatatattatgttggttttaaagttgtaatgttattaattagaaatttttttttgataagaagtttattttttaaaatgaatgaagtgtatttgtattttagtatgaattagtttatttagatagttttttataatttattaagatatatat

SEQ ID NO: 136 - DNA, 2333 bp, Artificial Sequence
  chemically treated genomic DNA (Homo sapiens)
attatgttttgagaatttgaagtaatagatatgaagagttttaagggattgtattaatgtacgttaagattagtttttattatatagtttaatgatacggttttaggtttagaagggatgttttatatttatagaattttatcgagtttaggtgttagtttagagaatttattatttttttgtttttttttaagagttaattgatgggatagtatgtaaagtatatgcgtttttgttgttaaaatagtagttaaaattgtttgtttagatgtgtaagattttatgaaatgttttggtaaaagttagtttaggagtgttggttaaggtgttgaagcgaagtaaggggagttaggattatttttgttattgaatttttttttttttatttttttttaaagatagcgagtttatttattttgataagatattttaggattttaaatttgatataattttggagaaagtagtgcgtgtgtgtgtgtgtgtgtgtgtgtgtgtgtgtggtgtagaagggtatttgggatatataatttttatagaaattttagtgttataaaaattttaggaggatttatatttaaaaaaatatataatagtttaagttgtttattttaattgaacgttgtgtgtttttattagatttttagtgagatttagtttaatgagttaattgtaaaataaagtttttgttaagggaatggtagaaaatgataaaattataattttgaatgattatttaaaagtaaaaagtattttttattattgtgtggagatttttttatttttatttttattcgaattgaatttttttttttaatgtttttttgaatagtttgtttttggtgttttgaaaatgtgtacgttgatagtagtattatatgttgtttttggtatagagtgagttaatagttgaattatttttgggtaattgcggattgtagttagtgtaagtgtaagagaaggtattttggttattaattcgttttatattttaattattttcgttcgttttatattttttgggtattcgatgttttttttttttgttaggtaatttgttttcgttttgtttaatttttcgatttttggttttagagaatagttttggttgtgggaattggttttgggaagtttttggcgttttttttattggtgattggtaagagtaatatttttatatttttaaaaagagtcgtttagtttttaatgatattttttggtaaaaaagaaaatgaaatatataattcggatttcggtttattaaacgtaggttaagagcgcggttgttgagtttcggttttgttgtgaggttgttgtttttattcgtttttcgtttttattagagttgatttgttttttgttattttttttcggtagtgtggatttattgtaacgtaggaatatttgggttggtatggataggattttagtattagatgttggttgttgttttagggatttttcgcggaaattatttagtatttagaagtcgttttaataaggaagtaattagtaaagtattgttggtgggagaatttcgcgaaatattttagaaaaatattagaaatcgttggagatttaatgatttacgttttttttagtttgtgttttttagttttttttggaggagtattaagtggtttgtgggtttttattttgcggtgggagggttgttttaagtatatttatttttgcgatagttaacgtcggggggttttagttttaattagggcgaggattacggattgtattttttttttttagcgtattggtttgtttattggagggtgagagggacgcgtagattttcggatttaggggttttgttttgtagatttttttattttattcggggtttttggtattcgtattatttagtattagtgtgattggcggtgtatttcggttttttcgcgttttattaaagtttttgtatatttttttttacgttgcgtttttgttatttacgtagttgtttttttgagcgtttcgcgtgtataaacgcgttttcggtttttacgcgtcggtggcgttgtttcgttgaggtggcgtcgggggagttcgtagaggcggcgggggagggagtgcggaggagaggattcgtgagttgcggggatttgggttcgtcgagtttttggggaagttgggtttcgtttttttcgggcgtttggggcgcgcgggaaggcgcggaggacgcgtcgtatttattcgttgttgttgtcggttgttgattgttatcgcggcggcggacgcggcgttgtgtcggagttcggtcgtttgtttaggttttaataggtttcgggtgaatttgcgggttcgtttatcggttatcg

SEQ ID NO: 137 - DNA, 2333 bp, Artificial Sequence
  chemically treated genomic DNA (Homo sapiens)
cgatggtcggtgagcggattcgtaggtttattcggagtttgttgagatttgggtaggcggtcgagtttcggtatagcgtcgcgttcgtcgtcgcggtggtagttagtagtcggtagtagtagcgggtgagtgcggcgcgtttttcgcgttttttcgcgcgttttaggcgttcggggggaacggagtttagtttttttaaaagttcggcgggtttaggttttcgtagtttacgggttttttttttcgtattttttttttcgtcgtttttgcgggttttttcggcgttattttagcgaggtagcgttatcgacgcgtaaggatcgggggcgcgtttgtgtacgcgggacgtttagaggagtagttgcgtgggtagtagaagcgtagcgtgggagaggatgtgtaggggttttaatggggcgcgagggggtcggaatgtatcgttagttatattggtgttaagtgatacgagtgttagagatttcgggtggggtggggggatttatagaatagaatttttgagttcggaggtttgcgcgttttttttattttttagtaaatagattagtgcgttgagagagagggatgtagttcgtggttttcgttttggttagagttggggtttttcgacgttaattatcgtagaaatagatgtatttggaatagtttttttatcgtagggtaaaaatttataaattatttaatatttttttagaaagggttgaggaatataggttggaggagacgtgggttattaggtttttagcggtttttgatatttttttaagatgtttcgcggggtttttttattagtaatgttttattggttatttttttattgaaacggtttttaagtgttgggtgattttcgcgggaagtttttggggtagtagttagtatttgatgttaggattttatttatattaatttagatgtttttgcgttgtagtaggtttatattgtcggggagaggtggtaagagataaattaattttagtggaaacgggaagcgagtgggaataatagttttatagtaagatcggggtttagtagtcgcgtttttggtttgcgtttggtggatcggaattcgggttgtgtgttttatttttttttttgttagaaaatattattaggaattaaacggttttttttaagagtgtgaaagtgttatttttgttagttattaatgaggagggcgttaaaagttttttagagttagtttttatagttaggattattttttaaagttagaggtcggaaagttgaatagaacggaagtaaattgtttggtagagggaagaggtatcgggtgtttagggggtgtagagcgggcgggggtgattggagtgtgaaacgaattggtggttagggtgtttttttttgtatttatattagttgtagttcgtagttatttagaggtggtttaattgttagtttattttgtgttagggatagtatgtggtattgttattagcgtgtatatttttaggatattaaagataaattgtttaaaagaatattagaagaaaagatttaattcgagtaaaagtagagataagaaaatttttatatagtagtagaaagtattttttatttttgaatgattatttagaattgtggttttgttattttttgttatttttttgataaaaattttattttgtaattgatttattggattgaattttattgaggatttgatggaaatatatagcgtttaattggaataaatagtttaaattgttgtgtgtttttttaaatgtagatttttttagaatttttgtggtattagaatttttataaagattatgtattttagatatttttttatattatatatatatatatatatatatatatatatacgtattgttttttttaaaattatgttagatttgaaattttagggtattttgttaaaatgaataagttcgttgtttttaaaaagaggtgggggaggggagatttagtggtaaaggtggttttgattttttttgtttcgttttagtattttggttaatatttttaaattagtttttgttaagatattttatgggattttatatatttaggtaggtagttttggttgttattttggtagtaagaacgtatgtgttttgtatattattttattagttaatttttgaagggaaataggaaggtgatgagttttttgagttggtatttgaattcggtgggattttgtgggtgtagagtattttttttgaatttaaaatcgtgttattggattatgtggtagagattaattttagcgtatattgatgtaattttttaagattttttatatttgttgttttaagtttttaaaatatggt

SEQ ID NO: 138 - DNA, 4333 bp, Artificial Sequence
  chemically treated genomic DNA (Homo sapiens)
atgtatattttaatgaattatagaaagttatttaaatgaattaatttatgttagggtatagatatattttatttattttaaaagatgagttttttattaaaaaggaatttttaattagtggtattataattttgaagttaatatggtatgtatatttaattaatgtaataaaatattttagttttgatatgagataaatgtttttaattatttttgggttgaaattttattttagagaagtttgttttatgaaataattaggaatgagattttaggaaattatgagaatttgatatgattttttgaattgatttttgaatgagttgttttttatttattttttatggggaattttaggataatgaaggagtaaatatttttttttttgaaatgtatgtttttgtttattattgtttttgggaggggtgaagaataaggtggtttgtgtttaggagtttgtaagtatataagtttattatatatagtgttttgggtaaaaattgatattaaatttgttttggtatatatttgtattgtttttaataattgttttaaaatttggtttttttagttattatttttatttagtatttttttgattttttttttttatatttaaatatattttgaaggttttttgttttttttttttttttttttttttttttttgtatatatattttatttttagggaagaaaattattttgttaatttgataattttatttaaatttattggagagagtagaatttaaattttatggtaattttttggtaatgttttggaggatttgtgtttttaagatagggattttagaaaggggaatatataaatttagtagtaagatatttttttttagtaggagtttttagttttttttaaatattttgtaatagaggatggtttgttttaatatatatttgtggttttatgagtttgtattgaagttggatatttataatattttttttaatattttattattttttttttttgataattatgttttgagaatttgaagtaatagatatgaagagttttaagggattgtattaatgtatgttaagattagtttttattatatagtttaatgatatggttttaggtttagaagggatgttttatatttatagaattttattgagtttaggtgttagtttagagaatttattatttttttgtttttttttaagagttaattgatgggatagtatgtaaagtatatgtgtttttgttgttaaaatagtagttaaaattgtttgtttagatgtgtaagattttatgaaatgttttggtaaaagttagtttaggagtgttggttaaggtgttgaagtgaagtaaggggagttaggattatttttgttattgaatttttttttttttatttttttttaaagatagtgagtttatttattttgataagatattttaggattttaaatttgatataattttggagaaagtagtgtgtgtgtgtgtgtgtgtgtgtgtgtgtgtgtgtggtgtagaagggtatttgggatatataatttttatagaaattttagtgttataaaaattttaggaggatttatatttaaaaaaatatataatagtttaagttgtttattttaattgaatgttgtgtgtttttattagatttttagtgagatttagtttaatgagttaattgtaaaataaagtttttgttaagggaatggtagaaaatgataaaattataattttgaatgattatttaaaagtaaaaagtattttttattattgtgtggagatttttttatttttatttttatttgaattgaatttttttttttaatgtttttttgaatagtttgtttttggtgttttgaaaatgtgtatgttgatagtagtattatatgttgtttttggtatagagtgagttaatagttgaattatttttgggtaattgtggattgtagttagtgtaagtgtaagagaaggtattttggttattaatttgttttatattttaattatttttgtttgttttatattttttgggtatttgatgttttttttttttgttaggtaatttgtttttgttttgtttaattttttgatttttggttttagagaatagttttggttgtgggaattggttttgggaagtttttggtgttttttttattggtgattggtaagagtaatatttttatatttttaaaaagagttgtttagtttttaatgatattttttggtaaaaaagaaaatgaaatatataatttggattttggtttattaaatgtaggttaagagtgtggttgttgagttttggttttgttgtgaggttgttgtttttatttgttttttgtttttattagagttgatttgttttttgttatttttttttggtagtgtggatttattgtaatgtaggaatatttgggttggtatggataggattttagtattagatgttggttgttgttttagggattttttgtggaaattatttagtatttagaagttgttttaataaggaagtaattagtaaagtattgttggtgggagaattttgtgaaatattttagaaaaatattagaaattgttggagatttaatgatttatgttttttttagtttgtgttttttagttttttttggaggagtattaagtggtttgtgggtttttattttgtggtgggagggttgttttaagtatatttatttttgtgatagttaatgttggggggttttagttttaattagggtgaggattatggattgtattttttttttttagtgtattggtttgtttattggagggtgagagggatgtgtagatttttggatttaggggttttgttttgtagatttttttattttatttggggtttttggtatttgtattatttagtattagtgtgattggtggtgtattttggtttttttgtgttttattaaagtttttgtatatttttttttatgttgtgtttttgttatttatgtagttgtttttttgagtgttttgtgtgtataaatgtgtttttggtttttatgtgttggtggtgttgttttgttgaggtggtgttgggggagtttgtagaggtggtgggggagggagtgtggaggagaggatttgtgagttgtggggatttgggtttgttgagtttttggggaagttgggttttgttttttttgggtgtttggggtgtgtgggaaggtgtggaggatgtgttgtatttatttgttgttgttgttggttgttgattgttattgtggtggtggatgtggtgttgtgttggagtttggttgtttgtttaggttttaataggttttgggtgaatttgtgggtttgtttattggttattgttggttatgttaattgtgttgtgggtttggggtgtgttttttgttggttttttttgtgttaattttttttatttatttgttgtttaggaagtggaatttggagttttttttttttttttttttgtttaatttgtaagaggtgggttttttttttttgtatttttattttttttattttttttttttttttgaagttttttgaagattttttaaattttgtgtttttttgggtgtgtgtggttaatttggttggtggttgggttttgtagtggtgtatttggagtgggtgttgtgggatgtgtgtggggtggtttttgtttgtgttgtttatatgggtttagttggttggttggggttgtttatgttgtttgggggaattgtaggttgtgggggagggtggggggtggttgttgaggggttttgggtggggtttgtttaaggttgttgtttgtttaaggttgttagttttatttggaggttgttgggagagttggagttttggatgtatttgttgtttagatttttattttttgggtttggttagtgggtgggggttaagtttggtttgtttttttatttttgggaaggggttagaggtttattaaagatttggtggttgggattttagtagtattgtttaagttagtgtttggaaggtttttttgttagaagtttatgtttagggttttggaataagtttttttatttatttatttttttaatgagtatttattaagtgtttattatatgttagtttatattgttttggaaattgaggatatggagaggaatttagtaattatattttaaggttgtgtagagttgataggtttttttggggtaggggtgggagatagtaagtaattaagtgaataaataaataaatatagagaaattaaggagatagtttaagttattaatatgaatttaaaattaataaattagtgttttgggggtaagagattttgggtggtattaggatgagtaggtaagaattaat

SEQ ID NO: 139 - DNA, 4333 bp, Artificial Sequence
  chemically treated genomic DNA (Homo sapiens)
gttggtttttgtttatttattttaatgttatttaaagttttttatttttagaatgttgatttattggttttgagtttgtgttagtagtttaaattgtttttttgatttttttgtatttgtttatttgtttgtttggttatttgttgttttttatttttattttgaaaaaatttattagttttatatagttttaaagtgtagttgttaagtttttttttgtatttttagtttttagaatagtgtgagttggtatatagtaggtgtttaataaatatttattgaaggagtgaatgaatggggaagtttattttaaggttttgaatatggatttttggtaagggagttttttaaatgttggtttgggtgatgttgttgggattttagttattagatttttaataagtttttgatttttttttgagggtggaagggtgaattgagtttggtttttatttattagttggatttagaaaatagaagtttaaatggtaaatgtatttagggttttaatttttttagtaatttttaaatgaggttgatggttttggataggtgatggttttggataggttttgtttggagttttttggtggttgttttttgtttttttttgtagtttgtagtttttttgggtggtgtggatagttttggttggttagttgagtttgtgtgggtggtgtgggtaggagttgttttatatgtgttttgtgatgtttgttttagatgtgttgttgtagggtttggttgttagttgagttggttgtgtgtgtttgggggagtgtagagtttggaaagtttttgagaagttttagaggagggaagggggtgggaagagtgggggtgtaagagagaaaaatttgttttttgtgagttgagtgaggaagaggggggggaaggttttgagttttgttttttgaatggtgggtggatagagaaggttggtgtggggaagattggtgggaggtgtgttttgggtttgtggtgtgattggtgtgattggtgatggttggtgagtggatttgtaggtttatttggagtttgttgagatttgggtaggtggttgagttttggtatagtgttgtgtttgttgttgtggtggtagttagtagttggtagtagtagtgggtgagtgtggtgtgttttttgtgtttttttgtgtgttttaggtgtttggggggaatggagtttagtttttttaaaagtttggtgggtttaggtttttgtagtttatgggtttttttttttgtatttttttttttgttgtttttgtgggtttttttggtgttattttagtgaggtagtgttattgatgtgtaaggattgggggtgtgtttgtgtatgtgggatgtttagaggagtagttgtgtgggtagtagaagtgtagtgtgggagaggatgtgtaggggttttaatggggtgtgagggggttggaatgtattgttagttatattggtgttaagtgatatgagtgttagagattttgggtggggtggggggatttatagaatagaatttttgagtttggaggtttgtgtgttttttttattttttagtaaatagattagtgtgttgagagagagggatgtagtttgtggtttttgttttggttagagttggggttttttgatgttaattattgtagaaatagatgtatttggaatagtttttttattgtagggtaaaaatttataaattatttaatatttttttagaaagggttgaggaatataggttggaggagatgtgggttattaggtttttagtggtttttgatatttttttaagatgttttgtggggtttttttattagtaatgttttattggttatttttttattgaaatggtttttaagtgttgggtgatttttgtgggaagtttttggggtagtagttagtatttgatgttaggattttatttatattaatttagatgtttttgtgttgtagtaggtttatattgttggggagaggtggtaagagataaattaattttagtggaaatgggaagtgagtgggaataatagttttatagtaagattggggtttagtagttgtgtttttggtttgtgtttggtggattggaatttgggttgtgtgttttatttttttttttgttagaaaatattattaggaattaaatggttttttttaagagtgtgaaagtgttatttttgttagttattaatgaggagggtgttaaaagttttttagagttagtttttatagttaggattattttttaaagttagaggttggaaagttgaatagaatggaagtaaattgtttggtagagggaagaggtattgggtgtttagggggtgtagagtgggtgggggtgattggagtgtgaaatgaattggtggttagggtgtttttttttgtatttatattagttgtagtttgtagttatttagaggtggtttaattgttagtttattttgtgttagggatagtatgtggtattgttattagtgtgtatatttttaggatattaaagataaattgtttaaaagaatattagaagaaaagatttaatttgagtaaaagtagagataagaaaatttttatatagtagtagaaagtattttttatttttgaatgattatttagaattgtggttttgttattttttgttatttttttgataaaaattttattttgtaattgatttattggattgaattttattgaggatttgatggaaatatatagtgtttaattggaataaatagtttaaattgttgtgtgtttttttaaatgtagatttttttagaatttttgtggtattagaatttttataaagattatgtattttagatatttttttatattatatatatatatatatatatatatatatatatgtattgttttttttaaaattatgttagatttgaaattttagggtattttgttaaaatgaataagtttgttgtttttaaaaagaggtgggggaggggagatttagtggtaaaggtggttttgattttttttgttttgttttagtattttggttaatatttttaaattagtttttgttaagatattttatgggattttatatatttaggtaggtagttttggttgttattttggtagtaagaatgtatgtgttttgtatattattttattagttaatttttgaagggaaataggaaggtgatgagttttttgagttggtatttgaatttggtgggattttgtgggtgtagagtattttttttgaatttaaaattgtgttattggattatgtggtagagattaattttagtgtatattgatgtaattttttaagattttttatatttgttgttttaagtttttaaaatatggttgttaagggagaaaaatgataggatgttggggaaaatattatggatatttgattttagtatagatttatagaattgtgggtgtgtattggagtaagttattttttattgtaaggtatttgaaagagattagaaatttttgttgagaaaaagtattttattgttagatttgtatatttttttttttgaaatttttgttttggggatataaattttttaggatattgttaaaagattgttatagggtttgaattttgttttttttaataagtttaggtaaggttgttaggttaataagatagtttttttttttgagaatggggtgtgtatatagagagagagagagagagagagagagaagataggaagtttttaaaatgtgtttgaatatggagaggagagattaaggagatgttgagtgagggtaatgattgggaaagttaaattttaaggtagttgttgaggataatataggtgtatgttaaagtaaatttgatgttagtttttatttaaagtattgtatgtagtaggtttatgtatttgtagatttttagatatgaattattttattttttattttttttaagaatagtaatgaataaaaatatatattttaaaaggagaaatatttgtttttttattattttaaaattttttatagaaaataaatgaaagataatttatttgaagattaatttaaaggattatgttaagtttttataattttttgaaattttatttttgattgttttataaagtaagtttttttagggtagaattttagtttgaaaatgattagaaatatttgttttatattagaattggagtgttttattatattggttgaatatatatattatgttggttttaaagttgtaatgttattaattagaaatttttttttgataagaagtttattttttaaaatgaatgaagtgtatttgtattttagtatgaattagtttatttagatagttttttataatttattaagatatatat

SEQ ID NO: 140 - DNA, 2333 bp, Artificial Sequence
  chemically treated genomic DNA (Homo sapiens)
attatgttttgagaatttgaagtaatagatatgaagagttttaagggattgtattaatgtatgttaagattagtttttattatatagtttaatgatatggttttaggtttagaagggatgttttatatttatagaattttattgagtttaggtgttagtttagagaatttattatttttttgtttttttttaagagttaattgatgggatagtatgtaaagtatatgtgtttttgttgttaaaatagtagttaaaattgtttgtttagatgtgtaagattttatgaaatgttttggtaaaagttagtttaggagtgttggttaaggtgttgaagtgaagtaaggggagttaggattatttttgttattgaatttttttttttttatttttttttaaagatagtgagtttatttattttgataagatattttaggattttaaatttgatataattttggagaaagtagtgtgtgtgtgtgtgtgtgtgtgtgtgtgtgtgtgtggtgtagaagggtatttgggatatataatttttatagaaattttagtgttataaaaattttaggaggatttatatttaaaaaaatatataatagtttaagttgtttattttaattgaatgttgtgtgtttttattagatttttagtgagatttagtttaatgagttaattgtaaaataaagtttttgttaagggaatggtagaaaatgataaaattataattttgaatgattatttaaaagtaaaaagtattttttattattgtgtggagatttttttatttttatttttatttgaattgaatttttttttttaatgtttttttgaatagtttgtttttggtgttttgaaaatgtgtatgttgatagtagtattatatgttgtttttggtatagagtgagttaatagttgaattatttttgggtaattgtggattgtagttagtgtaagtgtaagagaaggtattttggttattaatttgttttatattttaattatttttgtttgttttatattttttgggtatttgatgttttttttttttgttaggtaatttgtttttgttttgtttaattttttgatttttggttttagagaatagttttggttgtgggaattggttttgggaagtttttggtgttttttttattggtgattggtaagagtaatatttttatatttttaaaaagagttgtttagtttttaatgatattttttggtaaaaaagaaaatgaaatatataatttggattttggtttattaaatgtaggttaagagtgtggttgttgagttttggttttgttgtgaggttgttgtttttatttgttttttgtttttattagagttgatttgttttttgttatttttttttggtagtgtggatttattgtaatgtaggaatatttgggttggtatggataggattttagtattagatgttggttgttgttttagggattttttgtggaaattatttagtatttagaagttgttttaataaggaagtaattagtaaagtattgttggtgggagaattttgtgaaatattttagaaaaatattagaaattgttggagatttaatgatttatgttttttttagtttgtgttttttagttttttttggaggagtattaagtggtttgtgggtttttattttgtggtgggagggttgttttaagtatatttatttttgtgatagttaatgttggggggttttagttttaattagggtgaggattatggattgtattttttttttttagtgtattggtttgtttattggagggtgagagggatgtgtagatttttggatttaggggttttgttttgtagatttttttattttatttggggtttttggtatttgtattatttagtattagtgtgattggtggtgtattttggtttttttgtgttttattaaagtttttgtatatttttttttatgttgtgtttttgttatttatgtagttgtttttttgagtgttttgtgtgtataaatgtgtttttggtttttatgtgttggtggtgttgttttgttgaggtggtgttgggggagtttgtagaggtggtgggggagggagtgtggaggagaggatttgtgagttgtggggatttgggtttgttgagtttttggggaagttgggttttgttttttttgggtgtttggggtgtgtgggaaggtgtggaggatgtgttgtatttatttgttgttgttgttggttgttgattgttattgtggtggtggatgtggtgttgtgttggagtttggttgtttgtttaggttttaataggttttgggtgaatttgtgggtttgtttattggttattg

SEQ ID NO: 141 - DNA, 2333 bp, Artificial Sequence
  chemically treated genomic DNA (Homo sapiens)
tgatggttggtgagtggatttgtaggtttatttggagtttgttgagatttgggtaggtggttgagttttggtatagtgttgtgtttgttgttgtggtggtagttagtagttggtagtagtagtgggtgagtgtggtgtgttttttgtgtttttttgtgtgttttaggtgtttggggggaatggagtttagtttttttaaaagtttggtgggtttaggtttttgtagtttatgggtttttttttttgtatttttttttttgttgtttttgtgggtttttttggtgttattttagtgaggtagtgttattgatgtgtaaggattgggggtgtgtttgtgtatgtgggatgtttagaggagtagttgtgtgggtagtagaagtgtagtgtgggagaggatgtgtaggggttttaatggggtgtgagggggttggaatgtattgttagttatattggtgttaagtgatatgagtgttagagattttgggtggggtggggggatttatagaatagaatttttgagtttggaggtttgtgtgttttttttattttttagtaaatagattagtgtgttgagagagagggatgtagtttgtggtttttgttttggttagagttggggttttttgatgttaattattgtagaaatagatgtatttggaatagtttttttattgtagggtaaaaatttataaattatttaatatttttttagaaagggttgaggaatataggttggaggagatgtgggttattaggtttttagtggtttttgatatttttttaagatgttttgtggggtttttttattagtaatgttttattggttatttttttattgaaatggtttttaagtgttgggtgatttttgtgggaagtttttggggtagtagttagtatttgatgttaggattttatttatattaatttagatgtttttgtgttgtagtaggtttatattgttggggagaggtggtaagagataaattaattttagtggaaatgggaagtgagtgggaataatagttttatagtaagattggggtttagtagttgtgtttttggtttgtgtttggtggattggaatttgggttgtgtgttttatttttttttttgttagaaaatattattaggaattaaatggttttttttaagagtgtgaaagtgttatttttgttagttattaatgaggagggtgttaaaagttttttagagttagtttttatagttaggattattttttaaagttagaggttggaaagttgaatagaatggaagtaaattgtttggtagagggaagaggtattgggtgtttagggggtgtagagtgggtgggggtgattggagtgtgaaatgaattggtggttagggtgtttttttttgtatttatattagttgtagtttgtagttatttagaggtggtttaattgttagtttattttgtgttagggatagtatgtggtattgttattagtgtgtatatttttaggatattaaagataaattgtttaaaagaatattagaagaaaagatttaatttgagtaaaagtagagataagaaaatttttatatagtagtagaaagtattttttatttttgaatgattatttagaattgtggttttgttattttttgttatttttttgataaaaattttattttgtaattgatttattggattgaattttattgaggatttgatggaaatatatagtgtttaattggaataaatagtttaaattgttgtgtgtttttttaaatgtagatttttttagaatttttgtggtattagaatttttataaagattatgtattttagatatttttttatattatatatatatatatatatatatatatatatatgtattgttttttttaaaattatgttagatttgaaattttagggtattttgttaaaatgaataagtttgttgtttttaaaaagaggtgggggaggggagatttagtggtaaaggtggttttgattttttttgttttgttttagtattttggttaatatttttaaattagtttttgttaagatattttatgggattttatatatttaggtaggtagttttggttgttattttggtagtaagaatgtatgtgttttgtatattattttattagttaatttttgaagggaaataggaaggtgatgagttttttgagttggtatttgaatttggtgggattttgtgggtgtagagtattttttttgaatttaaaattgtgttattggattatgtggtagagattaattttagtgtatattgatgtaattttttaagattttttatatttgttgttttaagtttttaaaatatggt

SEQ ID NO: 142 - DNA, 26 bp, Artificial Sequence
  chemically treated genomic DNA (Homo sapiens)
ggtttttacgtacgttgtttttttcg

SEQ ID NO: 143 - DNA, 25 bp, Artificial Sequence
  chemically treated genomic DNA (Homo sapiens)
tcactaccgaaaacgaaaattacga

SEQ ID NO: 144 - DNA, 19 bp, Artificial Sequence
  chemically treated genomic DNA (Homo sapiens)
atcgccaacgccgcgcaaa

SEQ ID NO: 145 - DNA, 20 bp, Artificial Sequence
  chemically treated genomic DNA (Homo sapiens)
tcctctaaacgtcccgcgta

SEQ ID NO: 146 - DNA, 20 bp, Artificial Sequence
  chemically treated genomic DNA (Homo sapiens)
caaacgcgcccccgatcctt

SEQ ID NO: 147 - DNA, 20 bp, Artificial Sequence
  chemically treated genomic DNA (Homo sapiens)
gcgaggtagcgttatcgacg

SEQ ID NO: 148 - DNA, 21 bp, Artificial Sequence
  chemically treated genomic DNA (Homo sapiens)
ttttttttcgtcgtttttgcg
